(19) United States
(12) Patent Application Publication
(10) Pub. No.: US 2026/0174901 A1
(43) Pub. Date: Jun. 25, 2026

(54) Optimized PAH gene and expression cassette and use thereof

(71) Applicant: SUZHOU NGGT BIOTECHNOLOGY CO., LTD., Jiangsu (CN)

(72) Inventors: Shengmei WEN, Jiangsu (CN); Yiting LIU, Jiangsu (CN); Yufeng GUO, Jiangsu (CN); Lixin JIANG, Jiangsu (CN)

(21) Appl. No.: 19/126,444

(22) PCT Filed: Nov. 1, 2023
(86) PCT No.: PCT/CN2023/128981

§ 371 Date: May 1, 2025

(30) Foreign Application Priority Data
Nov. 2, 2022 (CN) 202211364551.7

(51) Int. Cl. A61K 48/00; A61K 38/00; A61P 3/00; C12N 9/02; C12N 15/86

(52) U.S. Cl. CPC A61K 48/0058; A61P 3/00; C12N 9/0071; C12N 15/86; A61K 38/00; C12N 2750/14143; C12N 2800/22; C12N 2820/60; C12N 2830/008; C12N 2830/42; C12N 2830/48; C12N 2830/50; C12Y 114/16001

(57) ABSTRACT

The present disclosure relates to an optimized PAH gene and an expression cassette and use thereof. Specifically, a polynucleotide molecule encoding PAH protein is disclosed. By means of using the polynucleotide molecule, expression cassette, expression vector, virion, and/or pharmaceutical composition provided herein, human PAH can be effectively, persistently, and stably expressed in the liver at a relatively low dose, thus steadily keeping the blood phenylalanine concentration in a subject at a relatively low level for a long period. Therefore, the present disclosure can be used for the treatment of phenylketonuria.

### TECHNICAL FIELD

[0001] The present disclosure belongs to the technical field of gene therapy, and particularly relates to an optimized PAH gene and expression cassette and uses thereof.

### BACKGROUND ART

[0002] Phenylketonuria (PKU, OMIM 261600) is an autosomal recessive genetic disease caused by mutations in the phenylalanine hydroxylase (PAH) gene. The incidence rate in the United States is 1/13,500, and the incidence rate in China is approximately 1/15,924. In neonates and children, the concentration of peripheral blood phenylalanine can be well managed through low-phenylalanine infant formula and diet, thereby ensuring the development of the nervous system. Currently, oral tetrahydrobiopterin, also known as sapropterin (brand name as Kuvan), and subcutaneous long-acting phenylalanine ammonia lyase (pegvaliase-pqpz, brand name as Palynziq, a PEGylated phenylalanine ammonia lyase) are available for use in adults. However, there are disadvantages and limitations in both drugs, mainly manifested in that they are suitable only for a subset of patients, cause immune-related side effects, and have a slow onset of action, etc.

[0003] According to the current genetic variation classification standards and treatment guidelines in United States, it is recommended to maintain the peripheral blood phenylalanine concentration between 120 μmol/L and 360 μmol/L via dietary management and medication throughout life (Vockley, J., et al., Phenylalanine hydroxylase deficiency: diagnosis and management guideline. Genet Med, 2014. 16 (2): p. 188-200.). The control standard of the EU treatment guidelines is less than 360 μmol/L for women under 12 years old, preparing for pregnancy or pregnant, and less than 600 μmol/L for other population (van Wegberg, A M J, et al., The complete European guidelines on phenylketonuria: diagnosis and treatment. Orphanet J Rare Dis, 2017. 12 (1): p. 162.). However, since it is difficult for adult patients to adhere to dietary control, only about 19% of patients do not adhere to it for more than 9 months. Therefore, most adult patients lose follow-up and have hyperphenylalaninemia. A survey showed that among adult PKU patients, 67% exhibited phenylalanine concentrations (Phe)>360 μmol/L, 45% exceeded 600 mol/L, and 18% exceeded 1200 μmol/L. Only about 24% of adult patients maintained concentrations at 5360 μmol/L (Brown, C S and U. Lichter-Konecki, Phenylketonuria (PKU): A problem solved? Mol Genet Metab Rep, 2016. 6: p. 8-12.).

[0004] Even with good early treatment, adult patients are likely to develop neurological symptoms such as tremor, active deep tendon reflexes, poor motor coordination, and white matter abnormalities, if peripheral blood phenylalanine was not managed. In addition, adult PKU patients also face many quality of life issues, such as low work ability, lack of autonomy, hopelessness, low motivation, depression and anxiety, difficulty in maintaining long-term relationships with friends, and prone to running away from home in old age (Murphy, G H, et al., Adults with untreated phenylketonuria: out of sight, out of mind. Br J Psychiatry, 2008. 193(6): p. 501-2., Hoeks, M P, M. den Heijer, and MC Janssen, Adult issues in phenylketonuria. Neth J Med, 2009. 67(1): p. 2-7.). For adolescents and adults with late-diagnosed late or inadequate early treatment, high peripheral phenylalanine levels can lead to seizures, spasms, severe behavioral issues such as aggressive behaviors, self-injury, hyperactivity, restlessness, irritability, sleep disturbances, anxiety, stereotypic behaviors, and neurological and cognitive problems (van Vliet, D., et al., Can untreated PKU patients escape from intellectual disability? A systematic review. Orphanet J Rare Dis, 2018. 13 (1): p. 149.; Ashe, K., et al., Psychiatric and Cognitive Aspects of Phenylketonuria: The Limitations of Diet and Promise of New Treatments. Front Psychiatry, 2019. 10: p. 561.; Romani, C., et al., Adult cognitive outcomes in phenylketonuria: explaining causes of variability beyond average Phe levels. Orphanet J Rare Dis, 2019. 14 (1): p. 561. (1): p. 273.; Trepp, R., et al., Impact of phenylalanine on cognitive, cerebral, and neurometabolic parameters in adult patients with phenylketonuria (the PICO study): a randomized, placebo-controlled, crossover, noninferiority trial. Trials, 2020. 21 (1): p. 178.; Altman, G., et al., Mental health diagnoses in adults with phenylketonuria: a retrospective systematic audit in a large UK single centre. Orphanet J Rare Dis, 2021. 16 (1): p. 520.; Trefz, F., et al., Health economic burden of patients with phenylketonuria (PKU)—A retrospective study of German health insurance claims data. Mol Genet Metab Rep, 2021. 27: p. 100764.; Yamada, K., et. al., Long-Term Neurological Outcomes of Adult Patients with Phenylketonuria before and after Newborn Screening in Japan. Int J Neonatal Screen, 2021. 7 (2).).

[0005] Therefore, there is still a great clinical need for the treatment of phenylketonuria in adults. Studies have shown that the treatment for adult patients by controlling peripheral blood phenylalanine concentrations can reduce or stop epileptic seizures and improve behavioral and neurocognitive issues (van Spronsen, F J, et al., Phenylketonuria. Nat Rev Dis Primers, 2021. 7 (1): p. 36.).

[0006] After nearly 60 years of development, gene therapy has achieved remarkable results. A single treatment with Zolgensma can allow children with spinal muscular atrophy (SMA) to grow and develop essentially like normal children. A single treatment with Luxturna can restore the vision of patients with Leber congenital amaurosis (LCA) to a state where they can basically live, study and work normally. Globally, in the present, two gene therapy projects for PKU are in Phase I clinical trials. High doses are used in both trials. However, neither has reported effective therapeutic effects yet, but there is a risk of potential liver toxicity associated with high doses.

### SUMMARY OF THE INVENTION

[0007] The purpose of the present disclosure is providing an optimized PAH gene, expression cassette and viral vector, to achieve effective, durable and stable expression of human PAH in the liver at a relatively low dose for the treatment of phenylketonuria.

[0008] To solve the above technical problems, the following technical solutions are provided in the present disclosure:

[0009] In a first aspect, the present disclosure provides a polynucleotide molecule encoding a PAH protein, comprising a nucleotide sequence having 90% or more identity with the nucleotide sequence set forth in SEQ ID NO. 10, SEQ ID NO. 11, SEQ ID NO. 12, SEQ ID NO. 13, SEQ ID NO. 14, SEQ ID NO. 15, SEQ ID NO. 16, SEQ ID NO. 17, SEQ ID NO. 19, SEQ ID NO. 20, SEQ ID NO. 21, SEQ ID NO. 22 or SEQ ID NO. 23, preferably a nucleotide sequence having 91%, 92%, 93%, 94%, 95%, 96%, 97%, 98%, 99% or more identity; more preferably a nucleotide sequence having 98% or more identity.

[0010] The second aspect of the present disclosure provides an expression cassette, which comprises the polynucleotide molecule provided in the first aspect of the present disclosure, and a promoter operably linked to the polynucleotide molecule.

[0011] In some embodiments, the expression cassette further comprises an expression control element, which is operably linked to the polynucleotide molecule.

[0012] In some embodiments, the expression control element is selected from at least one of a transcription/translation control signal, an enhancer, an intron, a polyA signal, an ITR, an insulator, an RNA processing signal, and an element that enhances the stability of mRNA and protein.

[0013] The third aspect of the present disclosure provides an expression vector, which comprises the polynucleotide molecule provided by the first aspect of the present disclosure or the expression cassette provided by the second aspect of the present disclosure.

[0014] In some embodiments, the expression vector is selected from a plasmid, a cosmid, a viral vector, an RNA vector, or a linear or circular DNA or RNA molecule.

[0015] In some embodiments, the expression vector is an adeno-associated virus vector.

[0016] The fourth aspect of the present disclosure provides a virus particle, which comprises at least one of the polynucleotide molecule provided by the first aspect of the present disclosure, the expression cassette provided by the second aspect of the present disclosure, and the expression vector provided by the third aspect of the present disclosure.

[0017] The fifth aspect of the present disclosure provides a pharmaceutical composition for treating phenylketonuria, which comprises at least one of the polynucleotide molecule provided in the first aspect of the present disclosure, the expression cassette provided in the second aspect of the present disclosure, the expression vector provided in the third aspect of the present disclosure, and the virus particle provided in the fourth aspect of the present disclosure.

[0018] The sixth aspect of the present disclosure provides the use of at least one of the polynucleotide molecule provided in the first aspect of the present disclosure, the expression cassette provided in the second aspect of the present disclosure, the expression vector provided in the third aspect of the present disclosure, the virus particle provided in the fourth aspect of the present disclosure, and the pharmaceutical composition of the fifth aspect of the present disclosure, in the preparation of a medicament for treating phenylketonuria.

[0019] The seventh aspect of the present disclosure provides the use of at least one of the polynucleotide molecule provided in the first aspect of the present disclosure, the expression cassette provided in the second aspect of the present disclosure, the expression vector provided in the third aspect of the present disclosure, the viral particle mentioned in the fourth aspect of the present disclosure, and the pharmaceutical composition of the fifth aspect of the present disclosure, in the treatment of phenylketonuria.

[0020] The eighth aspect of the present disclosure provides a method for treating phenylketonuria, comprising administering to a subject an effective amount of at least one of the polynucleotide molecules, the expression cassette, the expression vector, the viral particle and the pharmaceutical composition of the present disclosure.

[0021] By using the polynucleotide molecules, expression cassettes, expression vectors, viral particles and/or pharmaceutical compositions provided by the present disclosure, optimizing the coding gene of PAH so that it can express human PAH more effectively, effective, persistent and stable expression of human PAH in the liver at a relatively low dose is achieved, so that the concentration of phenylalanine in the subject's blood is maintained at a low level for a long time, thereby phenylketonuria is treated. Furthermore, the polynucleotide molecules, expression cassettes, expression vectors, viral particles and/or pharmaceutical compositions disclosed herein can be used at lower dosages and thus exhibit lower potential liver toxicity.

### THE DESCRIPTION OF THE DRAWINGS

[0022] FIG. 1 is a schematic diagram illustrating the structure of a PAH expression cassette of a recombinant AAV (rAAV) vector of the present disclosure.

[0023] FIG. 2 illustrates the in vitro expression of a codon-optimized PAH opt gene in HepG2 cells transfected with plasmids. Wherein, Figure A is a representative image of Western blotting of PAH protein; Figure B shows the quantitative results of Western blotting of PAH protein to detect the expression levels of PAH and GAPDH in HepG2 cells (blank plasmid transfection as control), in which WT or opt gene was expressed using pAAV8-ATT-PAH WT or pAAV8-ATT-PAH opt plasmid, respectively. Cell lysates were harvested 2 days after transfection with equal amounts of plasmids. Equal amounts of total protein were separated by SDS-PAGE and then subjected to immunoblotting. The expression level of PAH was normalized with GAPDH and calculated as a ratio to the WT expression level.

[0024] FIG. 3A shows the effect of reducing Phe level in PKU model mice after hydrodynamic tail vein (HTV) injection of PAH WT and optimized genes by plasmids. At Oh, 6 h, 24h, 3 days, 5 days, 10 days, 16 days and 19 days after injection, the blood of mice was collected to measure the Phe level in the blood; FIG. 3B illustrates the Phe level in the blood of PKU model mice at 10 days after injection.

[0025] FIG. 4 illustrates the effects of reducing Phe level in PKU model mice by AAV8-ATT-PAH WT and optimized gene viruses. During the 4 weeks after the injection, the blood of the mice was collected every week to measure the Phe level in the blood.

[0026] FIG. 5 is a schematic diagram of the structure of the PAH expression cassette of the recombinant AAV (rAAV) vector containing different promoters.

[0027] FIG. 6 illustrates the effect of reducing Phe level in PKU model mice after HTV injection of PAH WT expression cassettes containing different promoters via plasmids. On the 3rd day after the injection, the blood of the mice was collected to measure the Phe level in blood.

[0028] FIG. 7 is a schematic diagram of the structure of the PAH expression cassette of the recombinant AAV (rAAV) vector containing different expression regulatory elements.

[0029] FIG. 8 illustrates the effect of reducing Phe in PKU model mice after HTV injection of PAH expression cassettes containing different expression regulatory elements via plasmids. On the 3rd day after the injection, the bloods of the mice were collected to measure the Phe level in blood.

[0030] FIG. 9 is a schematic diagram of the structure of the PAH expression cassettes of the optimized recombinant AAV (rAAV) vectors containing different stuffer sequences.

[0031] FIG. 10A illustrates the effect of reducing Phe level in PKU model mice by AAV8-ATT-PAH opt9 viruses with different stuffer sequences. Blood was collected from mice every week for 8 weeks after injection to measure the Phe level in the blood. FIG. 10B illustrates the effect of reducing Phe level in PKU model mice by AAV8-ATT-PAH opt9 and AAV8-ATT-PAH opt-HPRT (4CpG) viruses. Within 4 weeks after injection, the blood of mice was collected every week to measure the Phe level in the blood.

[0032] FIG. 11 illustrates the functional test results of the expression product PAH of AAV8-ATT-PAH opt-HPRT (4CpG) virus in HepG2 cell lines to reduce the concentration of Phe. In HepG2 cells transiently transfected with AAVR, AAV8-ATT-PAH opt-HPRT (4CpG) virus was infected with MOIs of 0, 5E4 (i.e., 5×104), 1E5, and 2E5, and the change in Phe concentration was calculated using the HepG2 cell line not infected with the virus as a reference.

[0033] FIG. 12A illustrates the effect of reducing Phe level in PKU model mice by different doses of AAV8-ATT-PAH opt9-HPRT (4CpG)virus, wherein the blood of the mice was collected weekly for 6 weeks after injection to measure the Phe level in the blood. FIG. 12B illustrates the effect of reducing Phe level in PKU model mice by different doses of AAV8-ATT-PAH opt9-HPRT (4CpG) virus. Within 6 weeks after injection, the blood of mice was collected weekly to measure the Phe level in the blood.

[0034] FIG. 13A illustrates the Tyr level in the brain tissue of PKU homozygous mice after 6 weeks of administration with AAV8-ATT-PAH opt9-HPRT (4CpG) virus at the dose of 3.ME10 and 3.0E11 vg/mouse, wherein heterozygous mice that were not administered with the drug served as a normal mouse control group, and homozygous mice that were administered with the vehicle served as an untreated control group. FIG. 13B illustrates the content of 5-hydroxyindoleacetic acid (5-HIAA) in mouse brain tissue. FIG. 13C illustrates the comparison of coat color between PKU homozygous mice and the vehicle group after administration at a dose of 3.0E10 vg/mouse for 3 weeks.

### DETAILED DESCRIPTION OF THE PREFERRED EMBODIMENT

[0035] In order to more clearly illustrate the embodiments of the present disclosure or the technical solutions in the prior art, the drawings required for use in the embodiments or the description of the prior art will be briefly introduced below. Obviously, the drawings described below are only one embodiment of the present disclosure, and for ordinary technicians in this field, other embodiments can also be obtained based on these drawings.

### Definition

[0036] In the present disclosure, unless otherwise defined, scientific and technical terms used herein have the meanings commonly understood by those skilled in the art. Furthermore, the terms and laboratory procedures related to protein and nucleic acid chemistry, molecular biology, cell and tissue culture, microbiology, and immunology used herein are terms and common procedures widely used in the corresponding fields. Meanwhile, for a better understanding of the present disclosure, definitions and explanations of relevant terms are provided below.

[0037] As used herein, the terms “a” and “an” and “the” and similar referents refer to both the singular and the plural, unless otherwise indicated herein or clearly contradicted by context.

[0038] As used herein, the terms “about”, “substantially”, and “similar to” mean within an acceptable error range for the particular value as determined by one of ordinary skill in the art, which error range may depend in part on the manner in which the value is measured or determined or on the limitations of the measurement system. As used herein, references herein to “about” a value or parameter include (and describe) embodiments directed to the value or parameter itself. For example, description referring to “about X” includes description of “X”.

[0039] As used herein, “vector” refers to a recombinant plasmid or virus containing a nucleic acid to be delivered into a host cell (in vitro or in vivo).

[0040] As used herein, the term “polynucleotide molecule” or “nucleic acid” refers to a polymeric form of nucleotides of any length, either ribonucleotides or deoxyribonucleotides. Thus, the term includes, but is not limited to, single-, double-, or multi-stranded DNA or RNA, genomic DNA, cDNA, DNA-RNA hybrids, or polymers containing purine and pyrimidine bases or other natural, chemically or biochemically modified, non-natural or derived nucleotide bases. The backbone of a nucleic acid may comprise glycosides and phosphate groups (as typically found in RNA or DNA), or modified or substituted glycosides or phosphate groups. Alternatively, the backbone of the nucleic acid may comprises a polymer of synthetic subunits such as phosphoramidites and may thus be an oligodeoxynucleoside phosphoramidite (P-NH2) or a mixed phosphoramidate-phosphodiester oligomer. In addition, a double-stranded nucleic acid can be obtained from a single-stranded polynucleotide product which is chemically synthesized (by synthesizing a complementary chain and annealing the chains under appropriate conditions, or by synthesizing a complementary chain de novo using a DNA polymerase with appropriate primers).

[0041] “Recombinant viral vector” refers to a recombinant polynucleotide vector that comprises one or more heterologous sequences (i.e., non-viral nucleic acid sequences). In the case of a recombinant AAV vector, the recombinant nucleic acid is flanked by at least one, and preferably two, inverted terminal repeats (ITRs).

[0042] “Recombinant AAV vector (rAAV vector)” refers to a polynucleotide vector comprising one or more heterologous sequences (i.e., nucleic acid sequences not derived from AAV) flanked by at least one, preferably two, AAV inverted terminal repeats (ITRs). The rAAV vector can replicate and be packaged into infectious viral particles when present in host cells that have been infected with an appropriate helper virus (or express appropriate helper functions) and that express the AAV rep and cap gene products (i.e., AAV Rep and Cap proteins). The rAAV vector may be referred to as a “pro-vector” when it is incorporated into a larger polynucleotide (e.g., in a chromosome or in another vector such as a plasmid used for cloning or transfection), which can be “rescued” via replication and encapsidation in the presence of AAV packaging functions and appropriate helper functions. The rAAV vector may be in any of a variety of forms, including but not limited to a plasmid, a linear artificial chromosome, which may be complexed with or encapsulated within a liposome, and, in embodiments, encapsulated within a viral particle, particularly an AAV particle. The rAAV vector can be packaged into an AAV viral capsid to generate a “recombinant adeno-associated virus particle (rAAV particle)”. AAV helper functions (i.e., functions that allow AAV to be replicated and packaged by a host cell) can be provided in any of a variety of forms, including but not limited to helper viruses or helper viral genes that assist in AAV replication and packaging. Other AAV helper functions are known in the art.

[0043] [“rAAV virus” or “rAAV viral particle” refers to a viral particle composed of at least one AAV capsid protein and an encapsidated rAAV vector genome.

[0044] “Heterologous” means derived from an entity that is genotypically different from the rest of the entity to which it is being compared or into which it is introduced or incorporated. For example, a nucleic acid that is introduced into a different cell type by genetic engineering techniques is a heterologous nucleic acid (and, when expressed, may encode a heterologous polypeptide). Similarly, a cellular sequence (e.g., a gene or portion thereof) incorporated into a viral vector is a heterologous nucleotide sequence relative to the vector.

[0045] As used in reference to viral titer, the term “genomic particles (gp)”, “genome equivalents” or “genome copies” refers to the number of viral particles containing the recombinant AAV DNA genome, regardless of their infectiousness or functionality. The number of genomic particles in a particular vector preparation can be measured by methods as described in the Examples herein or, for example, in Clark et al. (1999) Hum. Gene Ther., 10:1031-1039; Veldwijk et al. (2002) Mol. Ther., 6:272-278.

[0046] As used in reference to viral titer, the term “infectious unit (iu)”, “infectious particles” or “replication units” refers to the number of recombinant AAV vector particles that are infectious and replication competent as measured by the infectious center assay, also known as the replication center assay, as described, e.g., in McLaughlin et al. (1988) J. Virol., 62:1963-1973.

[0047] As used in reference to viral titer, the term “transduction unit (tu)” refers to the number of infectious recombinant AAV vector particles that result in the production of a functional transgene product, as measured in a functional assay, such as described in the Examples herein or, e.g., Xiao et al. (1997) Exp. Neurobiol., 144: 113-124; or Fisher et al. (1996) J. Virol., 70: 520-532 (LFU assay).

[0048] “Inverted terminal repeat” or “ITR” sequence is a term well known in the art and refers to relatively short sequences found at the ends of the viral genome, in opposite orientations.

[0049] “AAV inverted terminal repeat (ITR)” sequence is a term well known in the art, which is a sequence of about 145 nucleotides present at both ends of the native single-stranded AAV genome. The outermost 125 nucleotides of the ITR can be present in either of two alternative orientations, resulting in heterogeneity between different AAV genomes and between the two ends of a single AAV genome. The outermost 125 nucleotides also contain several shorter regions of self-complementarity (termed the A, A′, B, B′, C, C′, and D regions) that allow interstrand base pairing to occur within this ITR portion.

[0050] A “helper virus” for AAV refers to a virus that allows AAV (which is a defective parvovirus) to replicate and be packaged in host cells. A number of such helper viruses have been identified, including adenovirus, herpes virus, and poxviruses such as vaccinia. Adenoviruses encompass several different subclasses, although subclass C adenovirus type 5 (Ad5) is the most commonly used. A variety of adenoviuses of human, non-human mammalian, and avian origin are known and available from depositories such as the ATCC. The herpes virus family, which is also available from depositories such as the ATCC, includes, for example, herpes simplex viruses (HSV), Epstein-Barr viruses (EBV), cytomegaloviruses (CMV), and pseudorabies viruses (PRV).

[0051] In the present disclosure, “stuffer sequence” refers to a human non-coding sequence added to make the nucleotide sequence length of the recombinant AAV expression cassette close to the length of the wild-type AAV genome. In some embodiments of the present disclosure, the addition of a stuffer sequence can enable the expression cassette or the polynucleotide sequence carrying it to have a higher viral packaging yield when expressed using an AAV viral vector.

[0052] “Percent (%) sequence identity” relative to a reference polypeptide or nucleic acid sequence is defined as the percentage of amino acid residues or nucleotides in a candidate sequence that are identical to the amino acid residues or nucleotides in the reference polypeptide or nucleic acid sequence, after aligning the sequences and introducing gaps, if necessary, to achieve the maximum percent sequence identity and not considering any conservative substitutions as part of the sequence identity. Alignment for purposes of determining percent amino acid or nucleic acid sequence identity can be achieved in various ways that are within the skill in the art, for instance, using publicly available computer software programs such as BLAST, BLAST-2, ALIGN or Megalign (DNASTAR) software. The preferred alignment software is ALIGN Plus (Scientific and Educational Software, Pennsylvania). Those skilled in the art can determine appropriate parameters for measuring alignment, including any algorithms needed to achieve maximal alignment over the full length of the sequences being compared. For purposes herein, the % amino acid sequence identity of a given amino acid sequence A to, with, or against a given amino acid sequence B (which may alternatively be referred to as having or comprising an amino acid sequence A having a certain % amino acid sequence identity to, with, or against a given amino acid sequence B) is calculated as follows: 100 multiplied by a fraction of X/Y, wherein X is the number of amino acid residues scored as identical matches by the sequence alignment program in the alignment of A and B, and wherein Y is the total number of amino acid residues in B. It will be appreciated that wherein the length of amino acid sequence A is not equal to the length of amino acid sequence B, the % amino acid sequence identity of A to B will not be equal to the % amino acid sequence identity of B to A. For purposes herein, the % nucleic acid sequence identity of a given nucleic acid sequence C to, with, or against a given nucleic acid sequence D (which may alternatively be referred to as a given nucleic acid sequence C having or comprising a certain % nucleic acid sequence identity to, with, or against a given nucleic acid sequence D) is calculated as follows: 100 multiplied by a fraction of W/Z, wherein W is the number of nucleotides scored as identical matches by a sequence alignment program in the alignment of C and D, and wherein Z is the total number of nucleotides in D. It will be appreciated that wherein the length of nucleic acid sequence C is not equal to the length of nucleic acid sequence D, the % nucleic acid sequence identity of C to D will not be equal to the % nucleic acid sequence identity of D to C.

[0053] An “effective amount” is an amount sufficient to affect beneficial or desired results, including clinical results (e.g., amelioration of symptoms, achievement of a clinical endpoint, etc.). An effective amount may be administered in one or more administrations. With respect to a disease state, an effective amount is an amount sufficient to ameliorate, stabilize or delay progression of the disease. For example, an effective amount of rAAV particles expresses a desired amount of a heterologous nucleic acid, such as a therapeutic polypeptide or therapeutic nucleic acid.

[0054] An “individual” or “subject” is a mammal. Mammals include, but are not limited to, domesticated animals (e.g., cows, sheep, cats, dogs, and horses), primates (e.g., humans and non-human primates such as monkeys), rabbits, and rodents (e.g., mice and rats). In some embodiments, the individual or subject is a human.

[0055] As used herein, “treatment” or “treating” is an approach for obtaining beneficial or desired clinical results. For purposes of the present disclosure, beneficial or desired clinical results include, but are not limited to, amelioration of symptoms, reduction in extent of disease, stabilized (e.g., non-worsening) state of disease, prevention of spread of disease (e.g., metastasis), delay or slowing of disease progression, improvement or palliation of the disease state, and remission (whether partial or complete), whether detectable or undetectable. “Treatment” or “treating” can also mean prolonging survival as compared to expected survival without receiving treatment.

[0056] The unit vg (Vector Genomes) represents the viral genome copy number.

[0057] The virus multiplicity of infection (MOI) means the ratio of the number of viruses to bacteria during infection, that is, the average number of phages that infect each bacterium.

[0058] In a first aspect, the present disclosure provides a polynucleotide molecule encoding a PAH protein, comprising a nucleotide sequence having 90% or more identity with the nucleotide sequence set forth in SEQ ID NO. 10, SEQ ID NO. 11, SEQ ID NO. 12, SEQ ID NO. 13, SEQ ID NO. 14, SEQ ID NO. 15, SEQ ID NO. 16, SEQ ID NO. 17, SEQ ID NO. 19, SEQ ID NO. 20, SEQ ID NO. 21, SEQ ID NO. 22 or SEQ ID NO. 23; preferably a nucleotide sequence having 91%, 92%, 93%, 94%, 95%, 96%, 97%, 98%, 99% or more identity: more preferably a nucleotide sequence having 98% or more identity.

[0059] In some embodiments, the polynucleotide molecule has a nucleotide sequence set forth in SEQ ID NO. 10, SEQ ID NO. 11, SEQ ID NO. 12, SEQ ID NO. 13, SEQ ID NO. 14, SEQ ID NO. 15, SEQ ID NO. 16, SEQ ID NO. 17, SEQ ID NO. 19, SEQ ID NO. 20, SEQ ID NO. 21, SEQ ID NO. 22 or SEQ ID NO. 23.

[0060] In some embodiments, the codon-optimized human PAH protein encoding gene has a nucleotide sequence set forth in SEQ ID NO. 17.

[0061] The second aspect of the present disclosure provides an expression cassette, which comprises the polynucleotide molecule provided in the first aspect of the present disclosure, and a promoter operably linked to the polynucleotide molecule.

[0062] In some embodiments, the promoter is a specific or non-specific promoter.

[0063] In some embodiments, the promoter comprises a core promoter.

[0064] In some embodiments, the promoter may be a constitutive promoter; preferably, the constitutive promoter is selected from at least one of a CMV promoter, an EF1A promoter, an EFS promoter, a CAG promoter, a CBh promoter, an SFFV promoter, an MSCV promoter, an SV40 promoter, an mPGK promoter, an hPGK promoter, and a UBC promoter, etc.

[0065] In some embodiments, the promoter is an inducible promoter; preferably, the inducible promoter comprises at least one of a tetracycline-regulated promoter, an alcohol-regulated promoter, a steroid-regulated promoter, a metal-regulated promoter, a pathogenicity-regulated promoter, a temperature/heat-inducible promoter, a light-regulated promoter, and an IPTG-inducible promoter. In some embodiments, the tetracycline-regulated promoter is selected from a Tet on promoter, a Tet off promoter, and a Tet Activator promoter. In some embodiments, the alcohol-regulated promoter is selected from the alcohol dehydrogenase I (alcA) gene promoter and a promoter responsive to alcohol transactivator protein (AlcR). In some embodiments, the steroid-regulated promoter is selected from the group consisting of a rat glucocorticoid receptor promoter, a human estrogen receptor promoter, a moth ecdysone receptor promoter, a retinoid promoter, and a thyroid receptor superfamily promoter. In some embodiments, the metal-regulated promoter is selected from yeast, mouse and human metallothionein promoters. In some embodiments, the pathogenicity-regulated promoter is selected from a salicylic acid-regulated promoter, an ethylene-regulated promoter, and a benzothiadiazole-regulated (BTH) promoter. In some embodiments of the present disclosure, the temperature/heat-inducible promoter is selected from an HSP-70 promoter, an HSP-90 promoter, and a soybean heat shock promoter. In some embodiments of the present disclosure, the light-regulated promoter is a light-responsive promoter of plant cells.

[0066] In some preferred embodiments, the promoter is a liver-specific promoter; some non-limiting examples of liver-specific promoters include, but are not limited to, ApoA-I promoter, ApoA-H promoter, ApoA-IV promoter, ApoB promoter, ApoC-1 promoter, ApoC-II promoter, ApoC-III promoter, ApoE promoter, albumin promoter, alpha-fetoprotein promoter, phosphoenolpyruvate carboxykinase (PCK1) promoter, phosphoenolpyruvate carboxykinase 2 (PCK2) promoter, transthyretin (TTR) promoter, α-antitrypsin (AAT or SerpinA1) promoter, TK (thymidine kinase) promoter, hemoglobin promoter, alcohol dehydrogenase 6 promoter, cholesterol 7α-25 hydroxylase promoter, factor IX promoter, α-microglobulin promoter, SV40 promoter, CMV promoter, Rous sarcoma virus-LTR promoter, HBV promoter, ALB promoter and TBG promoter. Of course, the minimal promoters derived from these promoters can also be used. More preferably, the liver-specific promoter is human α1 antitrypsin promoter (hAAT or SERPINA1 promoter), preferably, the core promoter comprises a nucleotide sequence having 90% or more identity with the nucleotide sequence set forth in SEQ ID NO. 3, 24, 25, 30, 33 or 38, preferably a nucleotide sequence having 91%, 92%, 93%, 94%, 95%, 96%, 97%, 98%, 99% or more identity, more preferably a nucleotide sequence having 98%, 99% or more identity; preferably, the core promoter has a nucleotide sequence set forth in SEQ ID NO. 3, 24, 25, 30, 33 or 38; more preferably, more preferably, the nucleotide sequence of the core promoter is set forth in SEQ ID NO. 3.

[0067] In some embodiments, the expression cassette further comprises an expression control element, which is operably linked to the polynucleotide molecule.

[0068] In some embodiments, the expression control element is selected from at least one of a transcription/translation control signal, an enhancer, an intron, a polyA signal, an ITR, an insulator, an RNA processing signal, and an element that enhances the stability of mRNA and protein.

[0069] In some embodiments, the expression cassette comprises a 5′ITR; preferably, the 5′ITR comprises a nucleotide sequence having 90% or more identity with the nucleotide sequence set forth in SEQ ID NO. 1, preferably a nucleotide sequence having 91%, 92%, 93%, 94%, 95%, 96%, 97%, 98%, 99% or more identity, more preferably a nucleotide sequence having 98%, 99% or more identity; more preferably, the 5′ITR has the nucleotide sequence set forth in SEQ ID NO. 1.

[0070] In some embodiments, the expression cassette comprises a 3′ ITR. In some preferred embodiments, the 3′ITR comprises a nucleotide sequence having 90% or more identity with the nucleotide sequence set forth in SEQ ID NO. 8, preferably a nucleotide sequence having 91%, 92%, 93%, 94%, 95%, 96%, 97%, 98%, 99% or more identity, and more preferably a nucleotide sequence having 98%, 99% or more identity; more preferably, the 3′ITR has the nucleotide sequence set forth in SEQ HD NO. 8.

[0071] In some embodiments, the expression cassette further comprises an enhancer. In some preferred embodiments, the enhancer is selected from ApoE HCR enhancer or an active fragment thereof, CRMSBS2 enhancer or an active fragment thereof, TTRm enhancer or an active fragment thereof, and CMV enhancer or an active fragment thereof; more preferably, the enhancer comprises a nucleotide sequence having 90% or more identity with the nucleotide sequence set forth in SEQ ID NO. 2, 29, 32, 37 or 40, preferably a nucleotide sequence having 91%, 92%, 93%, 94%, 95%, 96%, 97%, 98%, 99% or more identity, and more preferably a nucleotide sequence having 98%, 99% or more identity; preferably, the enhancer has a nucleotide sequence set forth in SEQ ID NO. 2, 29, 32, 37 or 40; more preferably, the nucleotide sequence of the enhancer is set forth in SEQ ID NO. 2.

[0072] In some embodiments, the expression cassette further comprises an intron; preferably, the intron is a truncated α1 antitrypsin intron or an active fragment thereof, a β-globin 2 intron or an active fragment thereof, an SV40 intron or an active fragment thereof, and an intron of a minute virus of mice or an active fragment thereof; preferably, the intron comprises a nucleotide sequence having 90% or more identity with the nucleotide sequence set forth in SEQ ID NO. 4, 26, 27, 28, 31 or 34, preferably a nucleotide sequence having 91%, 92%, 93%, 94%, 95%, 96%, 97%, 98%, 99% or more identity, and more preferably a nucleotide sequence having 98%, 99% or more identity; preferably, the intron has a nucleotide sequence set forth in SEQ ID NO. 4, 26, 27, 28, 31 or 34; more preferably, the nucleotide sequence of the intron is set forth in SEQ ID NO. 4.

[0073] In some embodiments, the promoter in the expression cassette is a combined promoter comprising an upstream regulatory element, a core promoter, and an intron.

[0074] In some embodiments, the upstream regulatory element is an enhancer or an active fragment thereof.

[0075] In some embodiments, the combined promoter comprises a nucleotide sequence having 90% or more identity with the nucleotide sequence set forth in SEQ ID NO. 44, 45, 46, 47, 48 or 49, preferably a nucleotide sequence having 91%, 92%, 93%, 94%, 95%, 96%, 97%, 98%, 99% or more identity, and more preferably a nucleotide sequence having 98%, 99% or more identity; preferably, the combined promoter has a nucleotide sequence set forth in SEQ ID NO. 44, 45, 46, 47, 48 or 49; more preferably, the nucleotide sequence of the combined promoter is set forth in SEQ ID NO. 44.

[0076] In some embodiments, the expression cassette further comprises a polyA signal; preferably, the polyA signal is at least one of bovine growth hormone poly A (BGH poly A), short poly A, SV40 polyA, and human β-globin poly A, preferably, the polyA signal comprises a nucleotide sequence having 90% or more identity with the nucleotide sequence set forth in SEQ ID NO. 7, preferably a nucleotide sequence having 91%, 92%, 93%, 94%, 95%, 96%, 97%, 98%, 99% or more identity, more preferably a nucleotide sequence having 98%, 99% or more identity; more preferably, the nucleotide sequence of the polyA signal is set forth in SEQ ID NO. 7.

[0077] In some embodiments, the expression cassette comprises an optimized stuffer sequence; preferably, the stuffer sequence is selected from a partial intron sequence of hypoxanthine phosphoribosyltransferase (HPRT) and a Woodchuck Hepatitis Virus Posttranscriptional Regulatory Element (WPRE); preferably, the number of CpG sequences contained in the partial intron sequence does not exceed 100, 80, 60, 50, 40, 30, 20, 15, 10, 9, 8, 7, 6, 5, 4, 3, 2 or 1; preferably, the partial intron sequence does not contain a CpG sequence or a Woodchuck Hepatitis Virus Posttranscriptional Regulatory Element (WPRE): preferably, the stuffer sequence is a partial intron sequence of hypoxanthine phosphoribosyltransferase (HPRT); preferably, the stuffer sequence comprises a nucleotide sequence having 90% or more identity with the nucleotide sequence set forth in SEQ ID NO. 39 or SEQ ID NO. 43, preferably a nucleotide sequence having 91%, 92%, 93%, 94%, 95%, 96%, 97%, 98%, 99% or more identity, and more preferably a nucleotide sequence having 98%, 99% or more identity; more preferably, the nucleotide sequence of the filler sequence is set forth in SEQ ID NO. 39 or SEQ ID NO. 43.

[0078] In some embodiments, the expression cassette includes a Kozak start sequence; the Kozak start sequence comprises a nucleotide sequence having 90% or more identity with the nucleotide sequence set forth in SEQ ID NO. 5, preferably a nucleotide sequence having 91%, 92%, 93%, 94%, 95%, 96%, 97%, 98%, 99% or more identity, and more preferably a nucleotide sequence having 98%, 99% or more identity; more preferably, the Kozak start sequence has the nucleotide sequence set forth in SEQ ID NO. 5.

[0079] In some embodiments, the expression cassette comprises a 5′ITR, an ApoE HCR enhancer, a human α1 antitrypsin promoter (SERPINA1 promoter), a truncated α1 antitrypsin intron (SerpinA1 intron), a Kozak start sequence (GCCACC, SEQ ID NO. 5), the polynucleotide molecule, a BGH poly A, a partial intron sequence of hypoxanthine phosphoribosyltransferase (HPRT) (HPRT (4CpG)) and a 3′ITR; preferably, the expression cassette comprises a nucleotide sequence having 90% or more identity with the nucleotide sequence set forth in SEQ ID NO. 80, SEQ ID NO. 81, SEQ ID NO. 82, SEQ ID NO. 83, SEQ ID NO. 84, SEQ ID NO. 85, SEQ ID NO. 86, SEQ ID NO. 87, SEQ ID NO. 89, SEQ ID NO. 90, SEQ ID NO. 91, SEQ ID NO. 92 or SEQ ID NO. 93, preferably a nucleotide sequence having 91%, 92%, 93%, 94%, 95%, 96%, 97%, 98%, 99% or more identity, and more preferably a nucleotide sequence having 98%, 99% or more identity; more preferably, the expression cassette has a nucleotide sequence set forth in SEQ ID NO. 80, SEQ ID NO. 81, SEQ ID NO. 82, SEQ ID NO. 83, SEQ ID NO. 84, SEQ ID NO. 85, SEQ ID NO. 86, SEQ ID NO. 87, SEQ ID NO. 89, SEQ ID NO. 90, SEQ ID NO. 91, SEQ ID NO. 92 or SEQ ID NO. 93.

[0080] The third aspect of the present disclosure provides an expression vector, which comprises the polynucleotide molecule provided by the first aspect of the present disclosure or the expression cassette provided by the second aspect of the present disclosure.

[0081] In some embodiments, the expression vector further comprises a gene encoding a marker, preferably, the marker is selected from at least one of an antibiotic resistance protein, a toxin resistance protein, a colored or fluorescent or luminescent protein, and a protein that mediates enhanced cell growth and/or gene amplification.

[0082] In some embodiments, the antibiotic is selected from at least one of ampicillin, neomycin, G418, puromycin and blasticidin.

[0083] In some embodiments, the toxin is selected from at least one of anthrax toxin and diphtheria toxin.

[0084] In some embodiments, the colored or fluorescent or luminescent protein is selected from at least one of green fluorescent protein, enhanced green fluorescent protein, red fluorescent protein and luciferase.

[0085] In some embodiments, the protein that mediates enhanced cell growth and/or gene amplification is dihydrofolate reductase (DHFR).

[0086] In some embodiments, the expression vector comprises an origin of replication; preferably, the origin of replication sequence is selected from at least one of f1 bacteriophage ori, RK2oriV, pUC ori and pSC101ori.

[0087] In some embodiments, the expression vector is selected from a plasmid, a cosmid, a viral vector, an RNA vector, or a linear or circular DNA or RNA molecule.

[0088] In some embodiments, the plasmid is selected from pCI, puc57, pcDNA3, pSG5, pJ603 or pCMV.

[0089] In some embodiments, the viral vector is selected from a retrovirus, an adenovirus, a parvovirus (e.g., an adeno-associated virus), a coronavirus, a negative-strand RNA virus such as an orthomyxovirus (e.g., influenza virus), a rhabdovirus (e.g., rabies and vesicular stomatitis virus), a paramyxovirus (e.g., mammary gland and Sendai), a positive-strand RNA virus (such as a picornavirus and an alphavirus), or a double-stranded DNA virus; the double-stranded DBA virus is selected from an adenovirus, a herpesvirus (e.g., herpes simplex virus type 1 and 2, Epstein-Barr virus, cytomegalovirus), a poxvirus (e.g., vaccinia virus, fowlpox virus, and canarypox virus), a Norwalk virus, a togavirus, a flavivirus, a reovirus, a papovavirus, a hepadnavirus, a baculovirus, or a hepatitis virus.

[0090] In some embodiments, the retrovirus is selected from avian leukocytoproliferative-sarcoma, mammalian C-type, B-type virus, D-type virus, HTLV-BLV collection, lentivirus or foamy virus.

[0091] In some embodiments, the lentiviral vector is selected from HIV-1, HIV-2, SIV, FIV, BIV, EIAV, CAEV, or ovine demyelinating leukoencephalitis lentivirus.

[0092] In some embodiments, the expression vector is an adeno-associated virus (AAV) vector.

[0093] In some embodiments, the adeno-associated virus is selected from AAV type 1, AAV type 2, AAV type 3, AAV type 4, AAV type 5, AAV type 6, AAV type 7, AAV type 8, AAV type 9, AAV type 10, avian AAV, bovine AAV, canine AAV, equine AAV, or ovine AAV.

[0094] In some embodiments, the expression cassette can be packaged in a rAAV vector with a capsid from any AAV serotype or a hybrid or variant thereof.

[0095] In some embodiments, the expression vector comprises a nucleotide sequence having 90% or more identity with the nucleotide sequence set forth in SEQ ID NO. 53, SEQ ID NO. 54, SEQ ID NO. 55, SEQ ID NO. 56, SEQ ID NO. 57, SEQ ID NO. 58, SEQ ID NO. 59, SEQ ID NO. 60, SEQ ID NO. 62, SEQ ID NO. 63, SEQ ID NO. 64, SEQ ID NO. 65, SEQ ID NO. 66, SEQ ID NO. 72, SEQ ID NO. 73, SEQ ID NO. 74, SEQ ID NO. 75, SEQ ID NO. 76, SEQ ID NO. 77, SEQ ID NO. 78, SEQ ID NO. 96, SEQ ID NO. 97, SEQ ID NO. 98, SEQ ID NO. 99, SEQ ID NO. 100, SEQ ID NO. 101, SEQ ID NO. 102, SEQ ID NO. 103, SEQ ID NO. 105, SEQ ID NO. 106, SEQ ID NO. 107, SEQ ID NO. 108 or SEQ ID NO. 109, preferably a nucleotide sequence with 91%, 92%, 93%, 94%, 95%, 96%, 97%, 98%, 99% or more identity, and more preferably a nucleotide sequence with 98%, 99% or more identity; more preferably, the expression vector has a nucleotide sequence set forth in SEQ ID NO. 53, SEQ ID NO. 54, SEQ ID NO. 55, SEQ ID NO. 56, SEQ ID NO. 57, SEQ ID NO. 58, SEQ ID NO. 59, SEQ ID NO. 60, SEQ ID NO. 62, SEQ ID NO. 63, SEQ ID NO. 64, SEQ ID NO. 65, SEQ ID NO. 66, SEQ ID NO. 72, SEQ ID NO. 73, SEQ ID NO. 74, SEQ ID NO. 75, SEQ ID NO. 76, SEQ ID NO. 77, SEQ ID NO. 78, SEQ ID NO. 96, SEQ ID NO. 97, SEQ ID NO. 98, SEQ ID NO. 99, SEQ ID NO. 100, SEQ ID NO. 101, SEQ ID NO. 102, SEQ ID NO. 103, SEQ ID NO. 105, SEQ ID NO. 106, SEQ ID NO. 107, SEQ ID NO. 108 or SEQ ID NO. 109; more preferably, the expression vector has a nucleotide sequence set forth in SEQ ID NO. 76, SEQ ID NO. 73, SEQ ID NO. 60 or SEQ ID NO. 78.

[0096] In some embodiments, the expression vector has a nucleotide sequence set forth in SEQ ID NO. 73.

[0097] The fourth aspect of the present disclosure provides a virus particle, which comprises at least one of the polynucleotide molecule provided by the first aspect of the present disclosure, the expression cassette provided by the second aspect of the present disclosure, and the expression vector provided by the third aspect of the present disclosure.

[0098] The fifth aspect of the present disclosure provides a pharmaceutical composition for treating phenylketonuria, which comprises at least one of the polynucleotide molecule provided in the first aspect of the present disclosure, the expression cassette provided in the second aspect of the present disclosure, the expression vector provided in the third aspect of the present disclosure, and the virus particle provided in the fourth aspect of the present disclosure.

[0099] The sixth aspect of the present disclosure provides the use of the polynucleotide molecule provided in the first aspect of the present disclosure, the expression cassette provided in the second aspect of the present disclosure, the expression vector provided in the third aspect of the present disclosure, the virus particle provided in the fourth aspect of the present disclosure, or the pharmaceutical composition of the fifth aspect of the present disclosure, in the preparation of a medicament for treating phenylketonuria.

[0100] The seventh aspect of the present disclosure provides the use of the polynucleotide molecule provided in the first aspect of the present disclosure, the expression cassette provided in the second aspect of the present disclosure, the expression vector provided in the third aspect of the present disclosure, the viral particle mentioned in the fourth aspect of the present disclosure, or the pharmaceutical composition of the fifth aspect of the present disclosure, in the treatment of phenylketonuria.

[0101] The eighth aspect of the present disclosure provides a method for treating phenylketonuria, comprising administering to a subject an effective amount of at least one of the polynucleotide molecule, the expression cassette, the expression vector, the viral particle and the pharmaceutical composition of the present disclosure.

[0102] For purposes of clarity and concise description, features are described herein as part of the same or separate embodiments, however, it will be understood that the scope of the present disclosure may include embodiments having a combination of all or some of the described features.

[0103] Hereinafter, the present disclosure will be described in more detail with reference to specific examples; however, the examples are only for illustrative purposes and have no limiting effect on the present disclosure.

### Materials and Methods:

### PAH Expression Cassette and AAV Vector

[0104] All wild-type and codon-optimized PAH gene sequences used in this study were synthesized by GenScript. Codon optimization was performed using a modified version of the GenSmart codonoptimization tool. The AAV vector-mediated PAH expression cassette is shown in FIG. 1.

[0105] The entire initial AAV shuttle plasmid vector was synthesized by Universal Genetics according to the sequence of SEQ ID NO. 112. Wild-type AAV2 ITR sequence was recombined between BamHI and AleI restriction sites in the vector to repair the mutated ITR sequence in the vector. The Amp resistance gene between the ApaLI restriction sites of the initial shuttle plasmid vector was replaced with Kan, then it was recombined in between the HindIII and NheI restriction sites of the vector to increase the length of the vector to facilitate the packaging of the AAV virus. The CAG promoter sequence was amplified by PCR from the pCAGGS vector (GeneWiz) and recombined in between the SpeI and KpnI restriction sites of the shuttle plasmid vector to obtain the final shuttle plasmid vector (SEQ NO ID. 113). The CAG promoter comprises a CMV enhancer (SEQ ID NO. 40), a chicken β-actin promoter (SEQ ID NO. 41) and a chimeric intron (SEQ ID NO. 42).

[0106] All expression cassette sequences were cloned in between the SalI and BamHI restriction sites of the shuttle plasmid vector to obtain the shuttle plasmid comprising the PAH gene of interest whose expression is mediated by AAV vector.

### Methods for AAV Vector Production and Purification

[0107] The production of AAV vector was conducted by a three-plasmid system, namely, a shuttle plasmid containing the PAH gene of interest, a pRepCap plasmid with the AAV vector repcap gene, and a helper plasmid Phelper (pRepCap plasmid, synthesized by GeneWiz according to the sequence of SEQ ID NO. 110, and a helper plasmid pHelper, synthesized by GeneWiz according to the sequence of SEQ NO ID. 111). By using PEI as a transfection reagent, the plasmids were co-transfected into HEK293 cells and the AAV viral vectors were packaged recombinantly. The cells were harvested 48-72 hours after transfection, and the harvested fluid was purified to obtain a recombinant AAV virus vector with a certain purity. The purification method was as follows:

[0108] First, the harvested fluid was pre-treated: HEK293 cells were fully lysed to release the AAV viral vector in the cells. Nuclease was added to digest the free nucleic acid. After digestion, deep filtration was used to remove large molecular impurities and cell fragments. After deep filtration, the filtrate was filtered twice to obtain a clarified fluid for affinity loading.

[0109] Utilizing the specific adsorption of ligands to proteins, the AAV viral vectors in the harvest fluid were captured via affinity chromatography, and most process-related impurities were removed, achieving the purposes of concentration and impurity removal. The collected eluate was mixed, neutralized with neutralization buffer, and stored in a sterile storage bottle, ready for loading onto anion chromatography.

[0110] Full AAV particles were separated with empty AAV particles by utilizing the difference in isoelectric points of different components via anion chromatography, where residual impurities were further removed. The eluate was collected into a new sterile storage bottle, and then the buffer was replaced, by ultrafiltration, with the one that is stable for the preparation. At the same time, the virus was concentrated to a titer of about 1×1013 vg/mL. The AAV vectors were finally sterilized, filtered, and packaged for later use.

### Quantification of AAV Vector Titers

[0111] After the purification of AAV, the content of virus should be measured. The genome titer is the most classic test item to characterize the physical titer of AAV The most common method for detecting genome titer is to design primer probes targeting the rAAV genome sequence and then perform Q-PCR detection.

[0112] Given that the ORF coding frame has been codon-optimized in the present disclosure, and the screening of multiple vector structures was involved, the common sequence in the vectors, which was PolyA, was selected as target for primer probes design, in order to ensure the quantitative stability and accuracy between different vector structures. F primer sequence: 5′-CAAGCCCATGTACACACCAG-3′ (SEQ ID NO. 114), R primer sequence. 5′-GGGCAAAGCTTCTGTCTGAG-3′ (SEQ ID NO. 115), probe sequence: 5′-CTGACATCTGCCACGAGCTGCTGGGCCA-3′ (SEQ ID NO. 116).

[0113] In the process of genome titer detection, the standard curve should be established first. The positive standard plasmid was diluted to 2×107, 2×106, 2×105, 2×104, 2×103, and 2×102 copies/μl respectively, which were used as a standard curve template. The linearity and amplification efficiency of the standard curve need to be controlled. Generally, R2>0.99 and an amplification efficiency between 90% and 110% were required. The pre-treated rAAV sample was then diluted and was subjected to QPCR detection. The Ct value of the sample should be within the range of the standard curve. The Ct value of the sample was substituted into the standard curve to calculate the rAAV sample genome titer and identify the product content.

### In Vitro Cell Plasmid Transfection Experiment

[0114] Human hepatoma cell HepG2 cells were digested and seeded into 96-well plates at 2.5×104 cells/well. At the same time, Lipo3K/DNA transfection complex was added for plasmid transfection experiment. First, Lipofectamine 3000 and P3000 (Thermo, L3000015) transfection reagents were premixed with the plasmid, added to the HepG2 cells in a 96-well plate, with 60ng/well of PAH-opt/WT expression plasmid, 90 nL/well of P3000 and 90 nL/well of Lipo 3000 (Thermo, L3000015), and cultured in a CO2 constant-temperature incubator for 48 h.

### Western Blot Analysis

[0115] 60 μL of RIPA lysis buffer (Beyotime, P0013B) containing 1x SDS loading buffer was added to each well of a 96-well plate inoculated with cultured cells. The cells were shaken and lysed for 10 min, then denatured at 95° C. for 10 min. 10 μL of protein was loaded for SDS-PAGE electrophoresis and then transferred to a PVDF membrane, incubated with Anti-PAH (SantaCruz, sc-271258) and Anti-GAPDH (TransGen, HC301) antibodies, and imaged and analyzed using the ChemiDoc Touch Imaging System (Bio-Rad).

Hydrodynamic Tail Vein Injection of Plasmid into Mice

[0116] A mouse was put in a suitable container, placed under an infrared lamp with a turned-on switch, and irradiated for several minutes. Then the mouse was taken out, and wiped the tail with an alcohol cotton ball to fully dilate the tail vein. The mouse was placed in a mouse holder with the tail exposed. A suitable syringe and needle were used to draw the sample to be injected, with a 1 mL syringe needle and a 5 mL syringe barrel. 2 mL (0.1 ml/g×mouse weight) of the sample to be injected was drawn and injected into the mouse through the tail vein. The injection should be completed within 5-8 seconds. The injection should be performed quickly and at a uniform speed. After the injection, the injection site was pressed with a dry cotton ball to stop the bleeding.

Injection of Virus Samples into Mice Through Tail Vein

[0117] A mouse was put in a suitable container, placed under an infrared lamp with a turned-on switch, irradiated for several minutes. Then the mouse was taken out, and wiped the tail with an alcohol cotton ball to fully dilate the tail vein. The mouse was placed in a mouse holder with the tail exposed. A suitable syringe and needle were used to draw the sample to be injected, with a 1 mL syringe needle and a 1 mL syringe barrel. After diluting the virus sample according to the virus administration dosage, 200 μL of the diluted sample to be injected was drawn and injected into the mouse through tail vein. The injection should be completed in more than 10 seconds. The injection should be performed slowly and at a uniform speed. After the injection, the injection site was pressed with a dry cotton ball to stop the bleeding.

### Quantitative Analysis of Phe in Blood

[0118] Blood was collected from the periorbital area of the mouse. 20 μL of blood was dropped onto the blood collection card and air dried naturally. The concentration of phenylalanine in blood was quantified using a phenylalanine assay kit (FENGHUA, AN302) and calibrated with a standard blood card.

### In Vitro Test for the Phe-Reducing Effect of PAH

[0119] The cells to be tested were cultured on a 24-well plate. During the test, the cells to be tested were collected and rinsed once with PBS. 150 μL of reaction solution (containing 0.25% NP-40, 50 mM Hepes, 150 mM KCL, 800 mM L-Phe, 100 μg/mL Catalase, 400 PM FeNH4 (SO4)2, 400 μM BH4, 2 mM DTT) was added to each well and incubated at 37° C. for 3 hours. 15 μL of the reaction solution was taken and dropped onto the blood collection card until air dried. The phenylalanine concentration in the blood was quantified using a phenylalanine assay kit (FENGHUA, AN302), and the reduction of Phe concentration was calculated.

### 5-HIAA Assay

[0120] After the mice were sacrificed, brain tissues were obtained. The level of 5-HIAA was detected by mass spectrometry by Suzhou PANOMIX Biomedical Tech Co., LTD. The specific method was as follows: the standard curve solution was prepared by gradient dilution of the 5-hydroxyindoleacetic acid standard. The brains tissue of the sample to be tested was homogenized, with the volume ratio of 1:1:10=homogenate solution:internal standard working solution:methanol. The mixture was centrifuged at 12000 rpm, 4° C. for 10 minutes, and the supernatant was collected for testing. XDB-C18 analytical 4.6*150 mm 5-Micron column and an electrospray ionization source were used for scanning detection using multiple reaction monitoring (MRM). The level of 5-HIAA in the sample to be tested was calculated according to the standard curve quantitative method.

### Quantitative Analysis of Tyr in Blood

[0121] Blood was collected from the periorbital area of mice. Serum was centrifuged using a 3 kDa ultrafiltration tube at 12000×g for 20 min, and the filtrate was collected. The standard curve solution was prepared by gradient dilution of Tyr standard. The serum samples were centrifuged with 3 kDa ultrafiltration tubes at 12000×g for 20 min, and the filtrate was collected for testing. The signal was detected at the wavelength of 210 nm by using a Chromcore 120 C18 column. The level of Tyr in the sample to be tested was calculated according to the standard curve quantitative method.

### Example 1: Construction and Purification of Adeno-Associated Virus Vector

### 1.1 Construction of Recombinant Adeno-Associated Virus Vector

[0122] The structure of the PAH expression cassette is shown in FIG. 1. The PAH expression cassette comprises, from the 5′ end to the 3′ end, a 5′ITR, an ApoE HCR enhancer, a SerpinA1 promoter, a truncated SerpinA1 intron, a Kozak sequence, a target gene (wild-type human PAH gene (hPAH WT) or optimized PAH gene (hPAH opt)), a BGH polyA, a HPRT (4CpG) stuffer sequence and a 3′ITR. The nucleotide sequences of the PAH expression cassettes comprising different target genes are set forth in SEQ ID NOs. 79-93, respectively, wherein,
[0123] the nucleotide sequence of 5′ITR is set forth in SEQ ID NO. 1.

[0124] The ApoE HCR enhancer is the hepatocyte control region of human apolipoprotein E, and its nucleotide sequence is set forth in SEQ ID NO. 2.

[0125] The SerpinA1 promoter is human α1 antitrypsin promoter, and its nucleotide sequence is set forth in SEQ ID NO. 3.

[0126] The SerpinA1 intron is a truncated α1 antitrypsin intron with a length of 261 bp, and its nucleotide sequence is set forth in SEQ ID NO. 4.

[0127] The Kozak sequence is inserted before the PAH gene sequence, and its sequence is set forth in SEQ ID NO. 5.

[0128] The hPAH WT gene is derived from the wild-type human PAH gene (GeneID: 5053), and its gene sequence is set forth in SEQ ID NO. 6. The NCBI accession number of the wild-type hPAH WT protein it encodes is NP_000268.1.

[0129] The optimized PAH gene hPAH opt is a codon-optimized gene opt1-15 encoding a wild-type human PAH protein, and its nucleotide sequences are SEQ ID NOs. 9-23, respectively.

[0130] The BGH polyA is the bovine growth hormone polyadenylation signal, and its nucleotide sequence is set forth in SEQ ID NO. 7.

[0131] The HPRT (4CpG) stuffer sequence is a partial intron sequence of hypoxanthine phosphoribosyltransferase, and its nucleotide sequence is set forth in SEQ ID NO. 43.

[0132] The nucleotide sequence of 3′ITR is set forth in SEQ ID NO. 8.

[0133] The expression cassette comprising the wild-type human PAH gene (hPAH WT) was constructed into the shuttle plasmid as pAAV8-ATT-PAH-WT-HPRT. Wherein, SEQ ID NO. 51 showed the sequence of the shuttle plasmid that comprised an expression cassette comprising a wild-type human PAH gene (hPAH WT).

[0134] The expression cassettes comprising the optimized PAH genes opt 1˜15 respectively were constructed as the shuttle plasmid pAAV8-ATT-PAH-opt1˜15-HPRT, respectively. Wherein, SEQ ID NOs. 52 to 66 showed the sequences of shuttle plasmids that comprised expression cassettes comprising codon-optimized genes opt1˜15, respectively.

### 1.2 Isolation and Purification of Adenoviral Vectors

[0135] The AAV vectors were generated by using three-plasmid system. The shuttle plasmids pAAV8-ATT-PAH-WT-HPRT or pAAV8-ATT-PAH-opt1˜15-HPRT comprising the PAH target genes respectively, the pRepCap plasmid with the AAV vector repcap gene, and the helper plasmid pHelper were used to co-transfect HEK293 cells, by using PEI as the transfection reagent. AAV viral vectors were recombinantly packaged, named as AAV8-ATT-PAH-WT-HPRT and AAV8-ATT-PAH-opt1˜1-5-HPRT, respectively. The cells were harvested 48-72 hours after transfection, and the harvested fluid was purified by affinity chromatography, further purified by anion chromatography, concentrated by ultrafiltration, and exchanged for buffer. The genome titers of the purified recombinant AAV viral vectors were measured, and the vector were sterilized, filtered, and packaged for later use.

### Example 2: In Vitro Detection for Expression of Codon-Optimized PAH Opt

[0136] In this example, the in vitro expression level of codon-optimized PAH opt was evaluated in HepG2 cell line (purchased from the Cell Bank of Type Culture Collection Committee of the Chinese Academy of Sciences, catalog number: TCHu72). A shuttle plasmid pAAV8-ATT-PAH WT comprising the wild-type human PAH gene (hPAH WT) driven by ATT promoter was constructed, whose nucleotide sequence was set forth in SEQ ID NO. 94. Shuttle plasmids pAAV8-ATT-PAH opt 1˜15 comprising the optimized PAH genes (hPAH opt1-15) respectively, whose nucleotide sequence were set forth in SEQ ID NO. 95˜109 respectively, were also constructed. The genes of interest were introduced into cells by using the method in aforementioned “in vitro cell plasmid transfection experiment”.

[0137] HepG2 cells were transiently transfected with plasmid pAAV8-ATT-PAH WT expressing PAH WT or plasmid pAAV8-ATT-PAH opt 1-15 expressing PAH opt, respectively. The expression of protein in cell lysates was evaluated by Western blot analysis, the results of which were shown in FIG. 2. Wherein, Figure A shows a representative image of Western blotting for PAH protein. Figure B shows the quantitative results. The expression levels of codon-optimized PAH genes opt2˜9 and opt11-15 in HepG2 cells were significantly higher than that of the wild-type human PAH gene (WT), indicating that the codon-optimized PAH genes disclosed in the present invention have a higher expression level.

### Example 3: In Vivo Efficacy Evaluation for Codon-Optimized PAH Opt in a PKU Mouse Model

3.1 Comparison of Codon-Optimized Plasmids for their Functional Activity in Reducing Phe Level in PKU Mice

[0138] By hydrodynamic tail vein injection, PKU model mice (purchased from Beijing Chengtian Biotechnology Co., Ltd., strain BTBR-Pah<enu2>/J) were injected with 40pg of pAAV8-ATT-PAH WT or pAAV8-ATT-PAH opt2, opt9, opt14 plasmids. At 0 h, 6 h, 24 h, 3 days, 5 days, 10 days, 16 days, and 19 days after injection, the blood of mice was collected to determine the Phe level in the blood, and the effect of the PAH opt plasmid in reducing Phe was compared and analyzed. The results are shown in FIGS. 3A and 3B. As shown in FIG. 3A, during D3˜D16, blood Phe level of mice injected with PAH opt9 plasmid was lower than that of PAH WT, while the Phe levels of mice injected with PAH opt2 and mice injected with PAH opt14 plasmids were both higher than that of PAH WT. Since the plasmid will be metabolically degraded in the cell, the effect of reducing Phe level will be gradually weaken over time. As shown in FIG. 3B, on the 10th day after injection, the blood Phe level of mice injected with PAH opt9 plasmid was lower than that of PAH WT, PAH opt2 and PAH opt14. Therefore, it was demonstrated that the codon-optimized PAH opt9 exhibits a better effect in reducing Phe level.

3.2 Comparison of Codon-Optimized AAV Viruses for their Functional Activity in Reducing Phe in PKU Mice

[0139] AAV viral vectors were recombinantly packaged with the shuttle plasmids of Example 2 by using the same method as 1.2 of Example 1, which were named as AAV8-ATT-PAH WT and AAV8-ATT-PAH opt2, 9, 11, and 14, respectively.

[0140] PKU model mice were injected intravenously with AAV8-ATT-PAH WT or AAV8-ATT-PAH opt2, opt9, opt11, or opt14 viruses at a dose of 1E10 vg/mouse. The blood of mice was collected every week after injection. Phe level in the blood was measured for 4 weeks. The effects of AAV8-ATT-PAH opt viruses in reducing Phe were compared and analyzed, which were shown in FIG. 4. As shown in FIG. 4, the blood Phe level of model mice injected with any one of AAV8-ATT-PAH opt2, 9, or 14 viruses was lower than that of AAV8-ATT-PAH WT, indicating that any of the codon-optimized AAV8-ATT-PAH opt2, 9, or 14 viruses has a better effect in reducing Phe level.

### Example 4: Screening for Liver-Specific Promoter Combinations in PKU Mouse Model

[0141] In this example, the effect of different promoters in driving PAH to reduce Phe level was evaluated in PKU model mice. The elements of the promoters for combination are shown in Table 1. ApoE HCR enhancer is a hepatocyte control region of human apolipoprotein E, whose nucleotide sequence is set forth in SEQ ID NO. 2. Core ApoE HCR enhancer is a hepatocyte control region of human apolipoprotein E, whose nucleotide sequence is set forth in SEQ ID NO. 37. CRMSBS2 enhancer is a modified Serpin1 enhancer, whose nucleotide sequence is set forth in SEQ ID NO. 29. TTRm enhancer is a mutated transthyretin enhancer region, whose nucleotide sequence is set forth in SEQ ID NO. 32. SerpinA1 promoter is human α1 antitrypsin promoter, whose nucleotide sequence is set forth in SEQ ID NO. 3. Core SerpinA1 promoter (218 bp) is the core region of human α1 antitrypsin promoter, whose nucleotide sequence consists of SEQ ID NOs. 24 and 25. Core SerpinA1 promoter (254 bp) is the core region of human α1 antitrypsin promoter, whose nucleotide sequence is set forth in SEQ ID NO.38. TTRm promoter (223 bp) is a mutant transthyretin promoter, whose nucleotide sequence is set forth in SEQ ID NO. 30. TTRm promoter (228 bp) is a mutant transthyretin promoter, whose nucleotide sequence is set forth in SEQ ID NO. 33. Truncated SerpinA1 intron (261 bp) is a truncated α1 antitrypsin intron, whose nucleotide sequence is set forth in SEQ ID NO. 4. Truncated SerpinA1 intron (206 bp) is a truncated α1 antitrypsin intron, whose nucleotide sequence is set forth in SEQ ID NO. 26. Modified human β-globin intron 2 is a partial sequence of modified human β-globin intron 2, whose nucleotide sequence is set forth in SEQ ID NO. 27. Modified SV40 intron is a partial sequence of simian vacuolating virus 40 intron, whose nucleotide sequence is set forth in SEQ ID NO. 28. SBR intron 3 is a modified intron of minute virus of mice, whose nucleotide sequence is set forth in SEQ ID NO 31. MVM intron is a partial sequence of minute virus of mice intron, whose nucleotide sequence is set forth in SEQ ID NO. 34.

[0142] The above combined promoters were used to construct expression cassettes respectively, the structure of which are shown in FIG. 5. The expression cassettes were constructed into shuttle plasmids to obtain plasmid vectors ATT PAH-WT (SEQ ID NO. 94), 100-AT-PAH-WT (SEQ ID NO. 67), ATG-PAH-WT SEQ ID NO. 68), ATS-PAH-WT(SEQ ID NO. 69), CTS-PAH-WT (SEQ ID NO. 70) and TTM-PAH-WT (SEQ ID NO. 71).

[0143] 40 μg of the plasmid vectors of this example were injected into PKU model mice by hydrodynamic tail vein injection. Three days after the injection, the blood of the mice was collected to determine the Phe level in the blood. The effects of different promoters in driving PAH to reduce Phe level were compared and analyzed. The results are shown in FIG. 6. The results show that the expression plasmid driven by the ATT promoter exhibits the most significant effect in reducing Phe level in PKU model mice.

TABLE 1
Constituent elements of different promoters

| | Upstream | | |
|---|---|---|---|
| Names of | regulatory | | |
| Combined | elements, such | | |
| promoter | as Enhancers | Core promoters | Introns |
| ATT | ApoE HCR | SerpinA1 promoter | Truncated SerpinA1 |
| (SEQ ID NO. 44) | (321 bp) | (398 bp) | intron |
| | (SEQ ID NO. 2) | (SEQ ID NO. 3) | (261 bp) |
| | | | (SEQ ID NO. 4) |
| 100-AT | ApoE HCR | Core SerpinA1 | Truncated SerpinA1 |
| (SEQ ID NO. 45) | (321 bp) | promoter | intron |
| | (SEQ ID NO. 2) | (218 bp) | (206 bp) |
| | | (SEQ ID NOs. 24-25) | (SEQ ID NO. 26) |
| ATG | ApoE HCR | Core SerpinA1 | Modified human |
| (SEQ ID NO. 46) | (321 bp) | promoter | β -globin |
| | (SEQ ID NO. 2) | (218 bp) | 2nd intron |
| | | (SEQ ID NOs. 24-25) | (184 bp) |
| | | | (SEQ ID NO. 27) |
| ATS | Core ApoE HCR | Core SerpinA1 | Modified SV40 |
| (SEQ ID NO. 47) | (192 bp) | promoter | intron |
| | (SEQ ID NO. 37) | (254 bp) | (93 bp) |
| | | (SEQ ID NO. 38) | (SEQ ID NO. 28) |
| CTS | CRMSBS2 | TTRm promoter | SBR intron 3 |
| (SEQ ID NO. 48) | (72 bp) | (223 bp) | (93 bp) |
| | (SEQ ID NO. 29) | (SEQ ID NO. 30) | (SEQ ID NO. 31) |
| TTM | TTR | TTRm promoter | MVM intron |
| (SEQ ID NO. 49) | (101 bp) | (228 bp) | (77 bp) |
| | (SEQ ID NO. 32) | (SEQ ID NO. 33) | (SEQ ID NO. 34) |

### Example 5: Effects of Other Expression Regulatory Elements on In Vivo Drug Efficacy in PKU Mouse Model

[0144] In this example, the effects of different expression regulatory elements (U6 promoter (SEQ ID NO. 35), CAG promoter (SEQ ID NO. 50), stuffer sequence HPRT (47CpG) (SEQ ID NO. 39) and stuffer sequence WPRE (SEQ ID NO. 36)) on the Phe-reducing effect of AAV8-ATT-PAH virus were evaluated in PKU model mice. The constructions of different expression cassettes are shown in FIG. 7.

[0145] The expression cassettes shown in FIG. 7 were constructed into shuttle plasmids to obtain plasmid vectors ATT-PAH-opt9-HPRT(47CpG) (SEQ ID NO. 73), U6-ATT-PAH-opt9-HPRT(47CpG) (SEQ ID NO. 75), ATT-PAH-opt9-WPRE (SEQ ID NO. 74), U6-ATT-PAH-opt9-WPRE (SEQ ID NO. 72), CAG-PAH-opt9 (SEQ ID NO. 77), and ATT-PAH-opt9 (SEQ ID NO. 76). 40pg of the above plasmids were injected into PKU model mice by hydrodynamic tail vein injection. On the third day after injection, the blood of mice was collected to measure the Phe level in the blood. The effects of different constructed PAH expression cassettes on reducing Phe were compared and analyzed. As shown in FIG. 8, the results showed that the vectors with the stuffer sequence HPRT added (ATT-PAH-opt9-HPRT(47CpG)) exhibit better effects on reducing Phe levers than those without stuffer sequence (ATT-PAH-opt9).

### Example 6: Effect of Stuff Sequence Optimization on In Vivo Efficacy in PKU Mouse Model

[0146] Some studies have shown that innate immune stimulation may be driven by CpG enrichment, resulting in the failure of AAV vector-mediated gene expression in vivo (Faust, Susan M et al. CpG-depleted adeno-associated virus vectors evade immune detection. The Journal of clinical investigation vol. 123, 7 (2013): 2994-3001.; Konkle, Barbara A et al. BAX 335 hemophilia B gene therapy clinical trial results: potential impact of CpG sequences on gene expression. Blood vol. 137, 6 (2021): 763-774.). In order to study the effect of CpG number in AAV8-ATT-PAH virus on reducing Phe level, experiments was conducted in PKU model mice, where a stuffer sequence with more CpGs (HPRT (47CpG)) and a stuffer sequence with less CpGs (HPRT (4CpG)) were used. The schematic structure of the PAH expression cassettes of the optimized recombinant AAV (rAAV) vectors, which comprised different stuffer sequences, are shown in FIG. 9. Wherein, the nucleotide sequence of HPRT (47CpG) is set forth in SEQ ID NO. 39, and that of HPRT (4CpG) is set forth in SEQ ID NO. 43.

[0147] The expression cassettes comprising different stuffer sequences were constructed into shuttle plasmids respectively. Recombinant viral vectors AAV8-ATT-PAH-opt9 (wherein the sequence of shuttle plasmid is set forth in SEQ ID NO. 76), AAV8-ATT-PAH-opt9-HPRT (47CpG) (wherein the sequence of shuttle plasmid is set forth in SEQ ID NO. 73), AAV8-ATT-PAH-opt9-HPRT (4CpG)(wherein the sequence of shuttle plasmid is set forth in SEQ ID NO. 60), and AAV8-HPRT (4CpG)-ATT-PAH-opt9 (wherein the sequence of shuttle plasmid is set forth in SEQ ID NO. 78), were obtained by using three-plasmid system of Example 1.

[0148] The viral vector was injected intravenously into PKU model mice at a dose of 2E1l vg/mouse. The blood of mice was collected every week after injection to measure the Phe level in the blood for 8 weeks. The effects of optimization of different stuffer sequences on reducing Phe level were compared and analyzed. As shown in FIG. 10A, after the viruses with the above four expression cassettes were injected into PKU model mice, the optimal therapeutic effects on blood Phe level of the mice were achieved (<120 μM).

[0149] In order to avoid immune stimulation caused by CpG enrichment, the expression cassette comprising the stuffer sequence with less CpGs was selected to further study the therapeutic effect of AAV8-ATT-PAH-opt9-HPRT (4CpG) on PKU model mice at a lower dose of 1E10 vg/mouse. The blood of the mice was collected every week after injection, and Phe level in the blood was measured for up to 4 weeks. The results are shown in FIG. 10B. As shown in FIG. 10B, at the low dose, the effect of AAV8-ATT-PAH-opt9-HPRT (4CpG) on reducing Phe level is better than that of AAV8-ATT-PAH-opt9.

### Example 7: In Vitro Test of the Optimized Expression Cassette AAV8-ATT-PAH-Opt9-HPRT (4CpG) Virus Expression Product PAH for its Function of Reducing Phe Level

[0150] In this example, the codon-optimized AAV8-ATT-PAH-opt9-HPRT (4CpG) viral expression product was evaluated for its function of reducing Phe level in the HepG2 cell line. First, HepG2 was transiently transfected with the plasmid expressing the adeno-associated virus receptor AAVR (the AAVR gene was synthesized by GeneWei according to SEQ ID NO. 117 and then inserted in between the NheI and XbaI restriction sites into the pcDNA3.1(+) plasmid). Overexpression of AAVR will increase the efficiency of AAV8 infecting HepG2. After 24 hours, AAV8-ATT-PAH-opt9-HPRT (4CpG) virus of Example 1 was used to infect the cells at MOIs of 0, 5E4, 1E5, and 2E5, respectively. After 48 hours of culture, the Phe level was detected. The HepG2 cell line not infected with the virus was used as a reference, and the activity of PAH in reducing Phe level was evaluated by calculating the change of Phe concentration. The results shown in FIG. 11 indicated that the AAV8-ATT-PAH-opt9-HPRT (4CpG) virus expression product is capable of reducing Phe level, with a dose-dependent effect relative to the MOI of viral infection.

### Example 8: In Vivo Efficacy of the Optimized Expression Cassette in the PKU Mouse Model: High Activity at Low Dose

[0151] In this example, the effects of different doses of AAV8-ATT-PAH-opt9-HPRT (4CpG)virus on reducing Phe level were evaluated in male and female PKU model mice.

[0152] The AAV8-ATT-PAH-opt9-HPRT (4CpG) virus of Example 1 was injected intravenously into male PKU model mice at doses of 3.0E11, 1.0E11, 3.3E10, 1.5E10, 1.1E10, and 3.0E9 vg/mouse, respectively. Blood was collected from mice every week after injection to measure Phe level in the blood for 6 weeks. The effects of different virus administration doses on reducing Phe level were compared and analyzed. The results are shown in FIG. 12A. As shown in FIG. 12A, within 2 to 6 weeks after virus injection, Phe level in mouse blood was lower than 120 μM at the dose of 3.0E11, 1.0E11, or 3.3E10 vg/mouse, indicating a therapeutic effect was achieved. Therefore, it is believed that the minimum effective dose of AAV8-ATT-PAH-opt9-HPRT (4CpG) virus for treating PKU in male mice is approximately 3.3E10 vg/mouse.

[0153] The AAV8-ATT-PAH-opt9-HPRT (4CpG) virus of Example 1 was injected intravenously into female PKU model mice at doses of 4.0E11, 2.0E11, 1.0E11, 5.0E10, and 2.5E10 vg/mouse, respectively. Blood was collected from mice every week after injection to measure the Phe level in the blood for 6 weeks. The effects of different virus administration doses on reducing Phe level were compared and analyzed. The results are shown in FIG. 12B. As shown in FIG. 12B, within 2 to 6 weeks after virus injection, Phe level in mouse blood was lower than 120 μM at the dose of 4.0E11, 2.0E11, 1.0E11, and 5.0E10 vg/mouse, indicating a therapeutic effect was achieved. Therefore, it is believed that the minimum effective dose of AAV8-ATT-PAH-opt9-HPRT (4CpG) virus for treating PKU in female mice is approximately 5.0E10 vg/mouse.

### Example 9: Other Efficacy of the Optimized Expression Cassette in the PKU Mouse Model

[0154] In this example, other therapeutic effects of AAV8-ATT-PAH-opt9-HPRT (4CpG) virus at the dose of 3.0E10 and 3.0E11 vg/mouse on reducing PKU model mice were evaluated in male PKU model mice. Six weeks after the administration of the virus, the Tyr level in the blood was detected. The results shown in FIG. 13A demonstrates that compared with PKU heterozygous mice (Jackson Lab) without disease symptoms, the Tyr level in the blood of PKU homozygous mice with disease symptoms (i.e., PKU model mice) was significantly reduced. After receiving AAV8-ATT-PAH-opt9-HPRT (4CpG) virus at the dose of 3.E10 and 3.0E11 vg/mouse, the Tyr level in the blood of PKU mice recovered to a level comparable to that of normal heterozygous mice. FIG. 13B shows the level of 5-hydroxyindoleacetic acid (5-HIAA, a pharmacodynamic marker for PKU patients) in the brain tissue of PKU homozygous mice, while heterozygous mice not given the drug were used as normal mouse controls. The results showed that compared with PKU heterozygous mice without disease symptoms, the 5-HIAA level in the brain tissue of PKU homozygous mice with disease symptoms was significantly reduced. After receiving AAV8-ATT-PAH-opt9-HPRT (4CpG) virus at the dose of 3.0E10 and 3.0E11 vg/mouse, the 5-HIAA level in the brain tissue of PKU mice recovered to the level comparable to that of normal heterozygous mice. In addition, the fur color of the treated PKU mice became darker and brighter. FIG. 13 C shows comparison for the fur color between the PKU homozygous mice and the vehicle group after 3 weeks of drug administration at the dose of 3.0E10 vg/mouse.

[0155] The present disclosure achieves the effect of effective, long-lasting and stable suppression of peripheral blood phenylalanine concentration in PKU mice with low dose and improves other PKU symptoms, through optimizing and screening for genes and expression regulatory elements. In addition, the present disclosure effectively reduce the dosage and possible side effects of gene therapy drugs used to treat PKU, improving the therapeutic effect.

[0156] The above description is only preferred embodiments of the present disclosure and is not intended to limit the present disclosure. Any modifications, equivalent substitutions, improvements, etc. made within the spirit and principles of the present disclosure shall be included in the scope of protection of the present disclosure.

1. A polynucleotide molecule encoding a PAH protein, comprising a nucleotide sequence having 90% or more identity with the nucleotide sequence set forth in SEQ ID NO. 10, SEQ ID NO. 11, SEQ ID NO. 12, SEQ ID NO. 13, SEQ ID NO. 14, SEQ ID NO. 15, SEQ ID NO. 16, SEQ ID NO. 17, SEQ ID NO. 19, SEQ ID NO. 20, SEQ ID NO. 21, SEQ ID NO. 22 or SEQ ID NO. 23; preferably, a nucleotide sequence having 91%, 92%, 93%, 94%, 95%, 96%, 97%, 98%, 99% or more identity; more preferably, a nucleotide sequence having 98%, 99% or more identity;
more preferably, the polynucleotide molecule has a nucleotide sequence set forth in SEQ ID NO. 10, SEQ ID NO. 11, SEQ ID NO. 12, SEQ ID NO. 13, SEQ ID NO. 14, SEQ ID NO. 15, SEQ ID NO. 16, SEQ ID NO. 17, SEQ ID NO. 19, SEQ ID NO. 20, SEQ ID NO. 21, SEQ ID NO. 22 or SEQ ID NO. 23.

2. An expression cassette comprising the polynucleotide molecule of claim 1, and a promoter operably linked to the polynucleotide molecule;
preferably, the promoter is a specific or non-specific promoter;
preferably, the promoter is a constitutive promoter or an inducible promoter; preferably, the constitutive promoter is selected from a CMV promoter, an EF1A promoter, an EFS promoter, a CAG promoter, a CBh promoter, an SFFV promoter, an MSCV promoter, an SV40 promoter, an mPGK promoter, an hPGK promoter and a UBC promoter; preferably, the inducible promoter comprises a tetracycline-regulated promoter, an alcohol-regulated promoter, a steroid-regulated promoter, a metal-regulated promoter, a pathogenicity-regulated promoter, a temperature/heat-inducible promoter and a light-regulated promoter, and an IPTG-inducible promoter;
preferably, the promoter comprises a core promoter;
preferably, the core promoter comprises a liver-specific promoter or an active fragment thereof; preferably, the liver-specific promoter is selected from an ApoA-I promoter, an ApoA-II promoter, an ApoA-IV promoter, an ApoB promoter, an ApoC-1 promoter, an ApoC-II promoter, an ApoC-III promoter, an ApoE promoter, an albumin promoter, an alpha-fetoprotein promoter, a phosphoenolpyruvate carboxykinase (PCK1) promoter, a phosphoenolpyruvate carboxykinase 2 (PCK2) promoter, a transthyretin (TTR) promoter, an α-antitrypsin (AAT or SerpinA1) promoter, a TK (thymidine kinase) promoter, a hemoglobin promoter, an alcohol dehydrogenase 6 promoter, a cholesterol 7α-25 hydroxylase promoter, a factor IX promoter, an α-microglobulin promoter, an SV40 promoter, a CMV promoter, a Rous sarcoma virus-LTR promoter, an HBV promoter, an ALB promoter and a TBG promoter; more preferably, the liver-specific promoter is a human α1 antitrypsin promoter, preferably, the core promoter comprises a nucleotide sequence having 90% or more identity with the nucleotide sequence set forth in SEQ ID NO. 3, 24, 25, 30, 33 or 38, preferably a nucleotide sequence having 91%, 92%, 93%, 94%, 95%, 96%, 97%, 98%, 99% or more identity, and more preferably a nucleotide sequence having 98%, 99% or more identity; preferably, the core promoter has a nucleotide sequence set forth in SEQ ID NO. 3, 24, 25, 30, 33 or 38; more preferably, the nucleotide sequence of the core promoter is set forth in SEQ ID NO. 3.

3. The expression cassette according to claim 2, further comprising an expression control element, wherein the expression control element is operably linked to the polynucleotide molecule;
preferably, the expression control element is selected from at least one of a transcription/translation control signal, an enhancer, an intron, a polyA signal, an ITR, an insulator, an RNA processing signal, and an element that enhances the stability of mRNA and protein;
preferably, the expression cassette comprises a 5′ITR; preferably, the 5′ITR comprises a nucleotide sequence having 90% or more identity with the nucleotide sequence set forth in SEQ ID NO. 1, preferably a nucleotide sequence having 91%, 92%, 93%, 94%, 95%, 96%, 97%, 98%, 99% or more identity, more preferably a nucleotide sequence having 98%, 99% or more identity; more preferably, the 5′ITR has the nucleotide sequence set forth in SEQ ID NO. 1;
preferably, the expression cassette comprises a 3′ITR; preferably, the 3′ITR comprises a nucleotide sequence having 90% or more identity with the nucleotide sequence set forth in SEQ ID NO. 8, preferably a nucleotide sequence having 91%, 92%, 93%, 94%, 95%, 96%, 97%, 98%, 99% or more identity, more preferably a nucleotide sequence having 98%, 99% or more identity; more preferably, the 3′ITR has the nucleotide sequence set forth in SEQ ID NO. 8;
preferably, the expression cassette further comprises an enhancer; preferably, the enhancer is selected from an ApoE HCR enhancer or an active fragment thereof, a CRMSBS2 enhancer or an active fragment thereof, a TTRm enhancer or an active fragment thereof, and an CMV enhancer or an active fragment thereof, more preferably, the enhancer comprises a nucleotide sequence having 90% or more identity with the nucleotide sequence set forth in SEQ ID NO. 2, 29, 32, 37 or 40, preferably a nucleotide sequence having 91%, 92%, 93%, 94%, 95%, 96%, 97%, 98%, 99% or more identity, and more preferably a nucleotide sequence having 98%, 99% or more identity; preferably, the enhancer has a nucleotide sequence set forth in SEQ ID NO. 2, 29, 32, 37 or 40; more preferably, the nucleotide sequence of the enhancer is set forth in SEQ ID NO. 2;
preferably, the expression cassette further comprises an intron; preferably, the intron is selected from a truncated α1 antitrypsin intron or an active fragment thereof, a β-globin 2 intron or an active fragment thereof, an SV40 intron or an active fragment thereof, and an intron of a minute virus of mice or an active fragment thereof, preferably, the intron comprises a nucleotide sequence having 90% or more identity with the nucleotide sequence set forth in SEQ ID NO. 4, 26, 27, 28, 31 or 34, preferably a nucleotide sequence having 91%, 92%, 93%, 94%, 95%, 96%, 97%, 98%, 99% or more identity, and more preferably a nucleotide sequence having 98%, 99% or more identity; preferably, the intron has a nucleotide sequence as shown in SEQ ID NO. 4, 26, 27, 28, 31 or 34; more preferably, the nucleotide sequence of the intron is set forth in SEQ ID NO. 4;
preferably, the promoter of the expression cassette is a combined promoter comprising an upstream regulatory element, a core promoter and an intron; preferably, the upstream regulatory element is an enhancer or an active fragment thereof,
preferably, the combined promoter comprises a nucleotide sequence having 90% or more identity with the nucleotide sequence set forth in SEQ ID NO. 44, 45, 46, 47, 48 or 49, preferably a nucleotide sequence having 91%, 92%, 93%, 94%, 95%, 96%, 97%, 98%, 99% or more identity, and more preferably a nucleotide sequence having 98%, 99% or more identity; preferably, the combined promoter has a nucleotide sequence set forth in SEQ ID NO. 44, 45, 46, 47, 48 or 49; more preferably, the nucleotide sequence of the combined promoter is set forth in SEQ ID NO. 44;
preferably, the expression cassette further comprises a polyA signal; preferably, the polyA signal is at least one of bovine growth hormone poly A (BGH poly A), short poly A, SV40 polyA, and human β-globin poly A; preferably, the polyA signal comprises a nucleotide sequence having 90% or more identity with the nucleotide sequence set forth in SEQ ID NO. 7, preferably a nucleotide sequence having 91%, 92%, 93%, 94%, 95%, 96%, 97%, 98%, 99% or more identity, more preferably a nucleotide sequence having 98%, 99% or more identity; more preferably, the nucleotide sequence of the polyA signal is set forth in SEQ ID NO. 7;
preferably, the expression cassette comprises an optimized stuffer sequence; preferably, the stuffer sequence is selected from a partial intron sequence of hypoxanthine phosphoribosyltransferase (HPRT) and a Woodchuck Hepatitis Virus Posttranscriptional Regulatory Element (WPRE); preferably, the number of CpG sequences contained in the partial intron sequence does not exceed 100, 80, 60, 50, 40, 30, 20, 15, 10, 9, 8, 7, 6, 5, 4, 3, 2 or 1; preferably, the partial intron sequence or a Woodchuck Hepatitis Virus Posttranscriptional Regulatory Element (WPRE) does not contain a CpG sequence; preferably, the stuffer sequence is a partial intron sequence of hypoxanthine phosphoribosyltransferase (HPRT); preferably, the stuffer sequence comprises a nucleotide sequence having 90% or more identity with the nucleotide sequence set forth in SEQ ID NO. 39 or SEQ ID NO. 43, preferably a nucleotide sequence having 91%, 92%, 93%, 94%, 95%, 96%, 97%, 98%, 99% or more identity, and more preferably a nucleotide sequence having 98%, 99% or more identity; more preferably, the nucleotide sequence of the filler sequence is set forth in SEQ ID NO. 39 or SEQ ID NO. 43; and
preferably, the expression cassette comprises a Kozak start sequence; the Kozak start sequence comprises a nucleotide sequence having 90% or more identity with the nucleotide sequence set forth in SEQ ID NO. 5, preferably a nucleotide sequence having 91%, 92%, 93%, 94%, 95%, 96%, 97%, 98%, 99% or more identity, and more preferably a nucleotide sequence having 98%, 99% or more identity; more preferably, the Kozak start sequence has the nucleotide sequence set forth in SEQ ID NO. 5.

4. The expression cassette according to claim 2, comprising a 5′ITR, an ApoE HCR enhancer, a human α1 antitrypsin promoter, a truncated α1 antitrypsin intron, a Kozak start sequence, the polynucleotide molecule, a BGH poly A, a partial intron sequence of hypoxanthine phosphoribosyltransferase (HPRT) and a 3′ITR; preferably, the expression cassette comprises a nucleotide sequence having 90% or more identity with the nucleotide sequence asset forth in SEQ ID NO. 80, SEQ ID NO. 81, SEQ ID NO. 82, SEQ ID NO. 83, SEQ ID NO. 84, SEQ ID NO. 85, SEQ ID NO. 86, SEQ ID NO. 87, SEQ ID NO. 89, SEQ ID NO. 90, SEQ ID NO. 91, SEQ ID NO. 92 or SEQ ID NO. 93, preferably a nucleotide sequence having 91%, 92%, 93%, 94%, 95%, 96%, 97%, 98%, 99% or more identity, and more preferably a nucleotide sequence having 98%, 99% or more identity; more preferably, the expression cassette has a nucleotide sequence set forth in SEQ ID NO.80, SEQ ID NO. 81, SEQ ID NO. 82, SEQ ID NO. 83, SEQ ID NO. 84, SEQ ID NO. 85, SEQ ID NO. 86, SEQ ID NO. 87, SEQ ID NO. 89, SEQ ID NO. 90, SEQ ID NO. 91, SEQ ID NO. 92 or SEQ ID NO. 93.

5. An expression vector comprising the polynucleotide molecule of claim 1 or the expression cassette of claim 2; preferably, the expression vector further comprises a gene encoding a marker, preferably, the marker is selected from at least one of an antibiotic resistance protein, a toxin resistance protein, a colored or fluorescent or luminescent protein, and a protein that mediates enhanced cell growth and/or gene amplification;
preferably, the antibiotic is selected from at least one of ampicillin, neomycin, G418, puromycin and blasticidin;
preferably, the toxin is selected from at least one of anthrax toxin and diphtheria toxin;
preferably, the colored or fluorescent or luminescent protein is selected from at least one of green fluorescent protein, enhanced green fluorescent protein, red fluorescent protein and luciferase;
preferably, the protein that mediates enhanced cell growth and/or gene amplification is dihydrofolate reductase (DHFR); and
preferably, the expression vector comprises an origin of replication; preferably, the origin of replication sequence is selected from at least one of f1 phage ori, RK2oriV, pUC ori and pSC101ori.

6. The expression vector according to claim 5, which is selected from a plasmid, a cosmid, a viral vector, an RNA vector or a linear or circular DNA or RNA molecule;
preferably, the plasmid is selected from pCI, puc57, pcDNA3, pSG5, pJ603 or pCMV;
preferably, the viral vector is selected from a retrovirus, an adenovirus, a parvovirus (e.g., an adeno-associated virus), a coronavirus, a negative-strand RNA virus such as an orthomyxovirus (e.g., influenza virus), a rhabdovirus (e.g., rabies and vesicular stomatitis virus), a paramyxovirus (e.g., mammary gland and Sendai), a positive-strand RNA virus (such as a picornavirus and an alphavirus), or a double-stranded DNA virus, the double-stranded DNA virus is selected from an adenovirus, a herpesvirus (e.g., herpes simplex virus type 1 and 2, Epstein-Barr virus, cytomegalovirus), a poxvirus (e.g., vaccinia virus, fowlpox virus, and canarypox virus), a Norwalk virus, a togavirus, a flavivirus, a reovirus, a papovavirus, a hepadnavirus, a baculovirus, or a hepatitis virus;
preferably, the retrovirus is selected from avian leukocytosis-sarcoma, mammalian C-type, B-type virus, D-type virus, HTLV-BLV collection, lentivirus or foamy virus; and
preferably, the lentiviral vector is selected from HIV-1, HIV-2, SIV, FIV, BIV, EIAV, CAEV or ovine demyelinating leukoencephalitis lentivirus.

7. The expression vector according to claim 5, which is an adeno-associated virus vector;
preferably, the adeno-associated virus is selected from AAV type 1, AAV type 2, AAV type 3, AAV type 4, AAV type 5, AAV type 6, AAV type 7, AAV type 8, AAV type 9, AAV type 10, avian AAV, bovine AAV, canine AAV, equine AAV, or ovine AAV; and
preferably, the expression vector comprises a nucleotide sequence having 90% or more identity with the nucleotide sequence set forth in SEQ ID NO. 53, SEQ ID NO. 54, SEQ ID NO. 55, SEQ ID NO. 56, SEQ ID NO. 57, SEQ ID NO. 58, SEQ ID NO. 59, SEQ ID NO. 60, SEQ ID NO. 62, SEQ ID NO. 63, SEQ ID NO. 64, SEQ ID NO. 65, SEQ ID NO. 66, SEQ ID NO. 72, SEQ ID NO. 73, SEQ ID NO. 74, SEQ ID NO. 75, SEQ ID NO. 76, SEQ ID NO. 77, SEQ ID NO. 78, SEQ ID NO. 96, SEQ ID NO. 97, SEQ ID NO. 98, SEQ ID NO. 99, SEQ ID NO. 100, SEQ ID NO. 101, SEQ ID NO. 102, SEQ ID NO. 103, SEQ ID NO. 105, SEQ ID NO. 106, SEQ ID NO. 107, SEQ ID NO. 108 or SEQ ID NO. 109, preferably a nucleotide sequence having 91%, 92%, 93%, 94%, 95%, 96%, 97%, 98%, 99% or more identity, and more preferably a nucleotide sequence having 98%, 99% or more identity; more preferably, the expression vector has a nucleotide sequence set forth in SEQ ID NO. 53, SEQ ID NO. 54, SEQ ID NO. 55, SEQ ID NO. 56, SEQ ID NO. 57, SEQ ID NO. 58, SEQ ID NO. 59, SEQ ID NO. 60, SEQ ID NO. 62, SEQ ID NO. 63, SEQ ID NO. 64, SEQ ID NO. 65, SEQ ID NO. 66, SEQ ID NO. 72, SEQ ID NO. 73, SEQ ID NO. 74, SEQ ID NO. 75, SEQ ID NO. 76, SEQ ID NO. 77, SEQ ID NO. 78, SEQ ID NO. 96, SEQ ID NO. 97, SEQ ID NO. 98, SEQ ID NO. 99, SEQ ID NO. 100, SEQ ID NO. 101, SEQ ID NO. 102, SEQ ID NO. 103, SEQ ID NO. 105, SEQ ID NO. 106, SEQ ID NO. 107, SEQ ID NO. 108 or SEQ ID NO. 109; more preferably, the expression vector has a nucleotide sequence set forth in SEQ ID NO. 76, SEQ ID NO. 73, SEQ ID NO. 60 or SEQ ID NO. 78.

8. A viral particle comprising the polynucleotide molecule of claim 1.

9. A pharmaceutical composition for treating phenylketonuria, comprising the polynucleotide molecule of claim 1; optionally, the pharmaceutical composition further comprises a pharmaceutically acceptable carrier; wherein the pharmaceutical composition expresses wild-type or codon-optimized PAH protein.

10. A method for treating phenylketonuria, comprising administering to a subject an effective amount of the pharmaceutical composition of claim 9.

11. A viral particle comprising the expression cassette of claim 2.

12. A pharmaceutical composition for treating phenylketonuria, comprising the expression cassette of claim 2; optionally, the pharmaceutical composition further comprises a pharmaceutically acceptable carrier; wherein the pharmaceutical composition expresses wild-type or codon-optimized PAH protein.

13. A method for treating phenylketonuria, comprising administering to a subject an effective amount of the pharmaceutical composition of claim 12.

14. A method for treating phenylketonuria, comprising administering to a subject an effective amount of the viral particle of claim 8.

15. A method for treating phenylketonuria, comprising administering to a subject an effective amount of the viral particle of claim 11.

The application's sequence listing, which the Patent Office published only in electronic form, follows.

SEQUENCE LISTING (117 sequences)

SEQ ID NO: 1 - DNA, 145 bp, synthetic construct
  source 1..145: mol_type = other DNA
ttggccactccctctctgcgcgctcgctcgctcactgaggccgggcgaccaaaggtcgcccgacgcccgggctttgcccgggcggcctcagtgagcgagcgagcgcgcagagagggagtggccaactccatcactaggggttcct

SEQ ID NO: 2 - DNA, 321 bp, Homo sapiens
  source 1..321: mol_type = genomic DNA
aggctcagaggcacacaggagtttctgggctcaccctgcccccttccaacccctcagttcccatcctccagcagctgtttgtgtgctgcctctgaagtccacactgaacaaacttcagcctactcatgtccctaaaatgggcaaacattgcaagcagcaaacagcaaacacacagccctccctgcctgctgaccttggagctggggcagaggtcagagacctctctgggcccatgccacctccaacatccactcgaccccttggaatttcggtggagaggagcagaggttgtcctggcgtggtttaggtagtgtgagaggg

SEQ ID NO: 3 - DNA, 398 bp, Homo sapiens
  source 1..398: mol_type = genomic DNA
gatcttgctaccagtggaacagccactaaggattctgcagtgagagcagagggccagctaagtggtactctcccagagactgtctgactcacgccaccccctccaccttggacacaggacgctgtggtttctgagccaggtacaatgactcctttcggtaagtgcagtggaagctgtacactgcccaggcaaagcgtccgggcagcgtaggcgggcgactcagatcccagccagtggacttagcccctgtttgctcctccgataactggggtgaccttggttaatattcaccagcagcctcccccgttgcccctctggatccactgcttaaatacggacgaggacagggccctgtctcctcagcttcaggcaccaccactgacctgggacagtgaatc

SEQ ID NO: 4 - DNA, 261 bp, synthetic construct
  source 1..261: mol_type = other DNA
gtaagtatgcctttcactgcgagaggttctggagaggcttctgagctccccatggcccaggcaggcagcaggtctggggcaggaggggggttgtggagtgggtatccgcctgctgaggtgcagggcagatcatcatgtgccttgactcggggcctggcccccccatctctgtcttgcaggacaattgccgtcttctgtctcgtggggcatcctcctgctggcaggcctgtgctgcctggtccctgtctccctggctgagga

SEQ ID NO: 5 - skipped

SEQ ID NO: 6 - DNA, 1359 bp, Homo sapiens
  source 1..1359: mol_type = genomic DNA
atgtccactgcggtcctggaaaacccaggcttgggcaggaaactctctgactttggacaggaaacaagctatattgaagacaactgcaatcaaaatggtgccatatcactgatcttctcactcaaagaagaagttggtgcattggccaaagtattgcgcttatttgaggagaatgatgtaaacctgacccacattgaatctagaccttctcgtttaaagaaagatgagtatgaatttttcacccatttggataaacgtagcctgcctgctctgacaaacatcatcaagatcttgaggcatgacattggtgccactgtccatgagctttcacgagataagaagaaagacacagtgccctggttcccaagaaccattcaagagctggacagatttgccaatcagattctcagctatggagcggaactggatgctgaccaccctggttttaaagatcctgtgtaccgtgcaagacggaagcagtttgctgacattgcctacaactaccgccatgggcagcccatccctcgagtggaatacatggaggaagaaaagaaaacatggggcacagtgttcaagactctgaagtccttgtataaaacccatgcttgctatgagtacaatcacatttttccacttcttgaaaagtactgtggcttccatgaagataacattccccagctggaagacgtttctcagttcctgcagacttgcactggtttccgcctccgacctgtggctggcctgctttcctctcgggatttcttgggtggcctggccttccgagtcttccactgcacacagtacatcagacatggatccaagcccatgtatacccccgaacctgacatctgccatgagctgttgggacatgtgcccttgttttcagatcgcagctttgcccagttttcccaggaaattggccttgcctctctgggtgcacctgatgaatacattgaaaagctcgccacaatttactggtttactgtggagtttgggctctgcaaacaaggagactccataaaggcatatggtgctgggctcctgtcatcctttggtgaattacagtactgcttatcagagaagccaaagcttctccccctggagctggagaagacagccatccaaaattacactgtcacggagttccagcccctctattacgtggcagagagttttaatgatgccaaggagaaagtaaggaactttgctgccacaatacctcggcccttctcagttcgctacgacccatacacccaaaggattgaggtcttggacaatacccagcagcttaagattttggctgattccattaacagtgaaattggaatcctttgcagtgccctccagaaaataaagtaa

SEQ ID NO: 7 - DNA, 225 bp, Bos taurus
  source 1..225: mol_type = genomic DNA
ctgtgccttctagttgccagccatctgttgtttgcccctcccccgtgccttccttgaccctggaaggtgccactcccactgtcctttcctaataaaatgaggaaattgcatcgcattgtctgagtaggtgtcattctattctggggggtggggtggggcaggacagcaagggggaggattgggaagacaatagcaggcatgctggggatgcggtgggctctatgg

SEQ ID NO: 8 - DNA, 145 bp, synthetic construct
  source 1..145: mol_type = other DNA
aggaacccctagtgatggagttggccactccctctctgcgcgctcgctcgctcactgaggccgggcgaccaaaggtcgcccgacgcccgggctttgcccgggcggcctcagtgagcgagcgagcgcgcagagagggagtggccaa

SEQ ID NO: 9 - DNA, 1356 bp, synthetic construct
  source 1..1356: mol_type = other DNA
atgagcactgctgtgctggagaacccaggcctaggcagaaagctctcagactttggccaggaaaccagctacatagaggacaactgcaaccagaatggagccatctccctgatcttcagcctgaaggaggaagtgggagccctggccaaggtgctgagactgtttgaagagaatgatgtgaacctgacccacattgagagcagacccagcagactgaagaaggatgaatatgagttcttcacccacctggacaaaagaagcctgccagcccttaccaatatcatcaagatcctgagacatgacattggggccacagtgcatgagctgtccagagacaaaaaaaaggacacagtgccatggttccccaggaccatccaggagctggacagatttgccaaccagatcctgagctatggtgctgaactggatgcagatcaccctggcttcaaagaccctgtgtacagggccagaagaaagcagtttgctgacattgcctacaactacaggcatggccagcctatccccagagtggagtacatggaggaggagaagaagacctggggcacagtgttcaagacactgaagagcctgtacaagacccatgcctgctatgaatacaaccacatcttccctctcctggagaaatactgtggcttccatgaggacaacatccctcagctggaggatgtgagccaattcctgcagacctgcacaggcttcagactgagacctgttgctggcctgctgagcagcagagacttccttggaggcttagccttcagagtcttccactgcacccagtacatcagacatggctccaagcctatgtacacccctgagcctgacatctgccatgagctgctgggccatgtccccctgttctctgacagatcctttgcccaattcagccaggaaataggcctggcctccctgggagcccctgatgaatacatagaaaagctggccaccatctactggttcacagtggaatttggcctgtgcaaacagggagatagcatcaaggcctatggagcaggcctgctgagcagctttggagagctgcaatactgtctgtctgagaagcctaagctgctgcccctggaactggaaaagacagccatccagaactacacagtgacagaattccagcctctgtactatgtggctgagagcttcaatgatgccaaagagaaggtgaggaactttgctgccaccatccccaggcctttctctgtgagatatgacccctacacccagaggattgaggtgctggacaacacccagcagctgaagatcttagctgactctatcaactctgaaattggcatcctgtgttctgccctgcagaagatcaag

SEQ ID NO: 10 - DNA, 1356 bp, synthetic construct
  source 1..1356: mol_type = other DNA
atgtccacagctgtgctggagaatcctggcctgggcagaaagctgtctgactttggccaggagaccagctacattgaagacaactgcaaccagaatggggccatcagcctcatcttcagcctgaaggaggaggtgggtgccctagccaaggtgctgagactctttgaagaaaatgatgtgaacctgacccacatagaatctagaccttccagactgaagaaggatgaatatgagttcttcacccaccttgacaagagaagcctgccagccctgaccaacatcatcaagatcctgaggcatgacataggagccacagtccatgagctgagcagagacaaaaagaaggacacagtcccttggttccctaggaccatccaggaactggacaggtttgccaaccaaatcctgagctatggagctgagctggatgctgaccacccaggcttcaaagacccagtgtacagagccagaagaaagcagtttgcagacattgcctacaactacagacatggccaacctatccccagggttgaatacatggaagaggaaaagaagacctggggcacagtgttcaagaccctgaagagcctgtacaaaacccatgcctgctatgagtacaaccacatcttccccctgcttgagaaatactgtggcttccatgaggataacatcccccagctggaggatgtgtcccagttcctgcagacctgcactggcttcagactgagacctgtggctggcctcctgagcagcagagacttcctgggaggcctggccttcagagtgttccactgcacccaatacatcaggcatggcagcaaacccatgtacacccctgagcctgatatctgtcatgaactgctgggccatgtgccactgttctctgacagaagctttgcccagttcagccaggagattggcctggccagcctgggagcccctgatgagtacattgagaagctggccaccatctactggttcacagtggaatttggcctgtgcaagcagggagacagcatcaaggcctatggagctggcctgctgagcagctttggagagctgcagtactgcctgtctgagaagcccaaactgctgcctttggagctggagaagacagccatccagaactacacagtgacagagttccagcccctgtactatgtggctgagagcttcaatgatgccaaggaaaaggtgagaaactttgctgccacaatccctaggcctttctctgtgagatatgacccctacacccagagaatagaagtgctggacaacacccagcagctgaaaatcctggctgacagcatcaacagtgagataggcatcctgtgttctgccctgcagaagatcaag

SEQ ID NO: 11 - DNA, 1356 bp, synthetic construct
  source 1..1356: mol_type = other DNA
atgagcacagctgtgctggagaaccctggcctgggcaggaaactgtctgactttggccaggagaccagctacatagaggacaactgtaaccagaatggtgccatcagcctgatcttcagcctgaaggaagaagttggagccctggccaaggtgctgaggctgtttgaggagaatgatgtcaacctgacccacatagagagcagaccaagcagactcaaaaaggatgagtatgaattcttcacccacctggacaagaggagcctgcctgccctgaccaacatcatcaagatcctaaggcatgacattggagccacagtgcatgagctgagcagggacaagaagaaggacacagtgccctggttccccagaaccatccaggaactggacagatttgccaaccagatcctgagctatggtgctgagctggatgctgaccaccctggcttcaaggaccctgtgtacagagccagaaggaagcagtttgctgatattgcctacaactacagacatggccagcctatccccagagttgagtacatggaggaagagaaaaaaacctggggcacagtgttcaagaccctgaagtccctgtacaagacccatgcctgctatgagtacaaccacatcttccctctgctggaaaaatactgtggcttccatgaggacaacatccctcagctggaggatgtgtcccagttcctgcagacctgtacaggcttcagactgagacctgtggctggcctgctgagcagcagagatttcctgggaggcctggccttcagagtgttccactgcacccaatacatcagacatggcagcaagcctatgtacaccccagagcctgacatctgccatgagttgctgggccatgtgcccctgttctctgacagatcctttgcccagttctctcaggaaattggcctggccagcctgggagcccctgatgaatacattgaaaagctggccaccatctactggttcacagtggaatttggcctttgcaagcagggggactccatcaaggcctatggagctggcctgctgagcagctttggagaactgcaatactgcctgtctgaaaagcccaagctgctgcctttggagctggagaaaacagccatccagaactacacagtgactgagttccaaccactgtactatgtggctgagagcttcaatgatgccaaggaaaaggtgagaaactttgcagccacaatccctagacccttctcagtgagatatgacccttacacccagagaattgaagtgctggacaacacccagcagctcaagatcctggctgatagcatcaactctgagattggcatcctgtgctctgccctgcagaagatcaaa

SEQ ID NO: 12 - DNA, 1356 bp, synthetic construct
  source 1..1356: mol_type = other DNA
atgagcacagctgtgctggagaaccctggcctgggcagaaaactgtctgactttggccaggaaacctcctacatagaagacaactgcaaccagaatggagccatcagcctgatcttcagcctgaaggaggaggtaggtgccctggccaaggtgctgagactgtttgaggagaatgatgtgaacctaacccacattgagagcaggcctagcagactgaagaaggatgaatatgagttcttcacccaccttgacaaaagatcactccctgccctgaccaacatcatcaagatcctgagacatgatataggagccactgtgcatgaactgagcagggacaagaagaaggacacagtgccctggttccccagaacaatccaggagctggacagatttgccaaccagatcctgagctatggagcagaactggatgctgaccacccaggcttcaaggaccctgtgtacagagccagaagaaagcagtttgctgacattgcctacaactacagacatggccagcccatccccagggttgaatacatggaggaggaaaagaagacctggggcacagtgttcaaaaccctgaaatccctgtacaaaacccatgcctgttatgaatacaaccacatcttccccctgcttgagaagtactgtggcttccatgaagataacatccctcagctggaggatgtgagccagttcctgcagacctgcacaggcttcagactgagacctgtggctggcctgctgagcagcagggacttcttaggaggcctggccttcagagtgttccactgcacccagtacatcagacatggcagcaagcccatgtacacccctgagcctgacatctgccatgagctgctgggccatgtccctctgttctctgacagaagctttgcccaattctcccaggagattggcctggccagccttggggccccagatgagtacattgagaagctggccaccatctactggttcacagtggagtttggcctgtgcaaacagggagacagcatcaaggcctatggagctggcctgctgagcagctttggagaactgcagtactgtctgagtgaaaagcctaagctgctgccactggagctggagaagacagccatccaaaactacacagtgacagagttccagcctctgtactatgtggctgaaagcttcaatgatgccaaggaaaaggtgagaaactttgctgccaccatccctaggcctttctctgtgagatatgacccctacacccaaagaattgaggtcctggacaacacccagcagttaaaaatcctggctgactctatcaactctgaaattggcatcctgtgctctgccctgcagaagatcaag

SEQ ID NO: 13 - DNA, 1356 bp, synthetic construct
  source 1..1356: mol_type = other DNA
atgagcacagctgtgctggagaacccaggcttgggcagaaagctgtctgactttggccaggagaccagctacattgaggacaactgcaaccaaaatggtgccatctccctgatcttcagcctcaaggaggaagttggagccctggccaaagtgttaagactgtttgaagaaaatgatgtgaacctgacccacattgaaagcagacctagcagactgaagaaagatgagtatgagttcttcacccacctggataagagaagcctgcctgccctgaccaacatcatcaagatcctgagacatgacataggggccacagtgcatgagctgagcagagacaaaaaaaaagacacagtgccttggttccccaggacaatccaggagctggacagatttgccaaccagatcctgagctatggagctgagctggatgctgaccaccctggcttcaaggaccctgtctacagagccaggaggaagcagtttgctgatattgcctacaactacagacatggccaacccatccctagagttgagtacatggaggaagaaaaaaagacctggggcacagtgttcaagaccctgaagagcctgtacaagacccatgcctgctatgagtacaatcacatcttccccctgctggagaagtactgtggcttccatgaagacaacatccctcagctggaagatgtgagccagttcctgcagacctgcacaggcttcagactgagacctgtggcaggcctgctgagcagcagagacttcctgggaggcctggccttcagagtgttccactgtacccaatacatcagacatggcagcaagcccatgtacaccccagagcctgacatctgccatgagctgctgggccatgtgcccctgttctctgacaggagctttgcccagttcagccaggagataggccttgccagcctgggagcccctgatgaatacatagagaagttagccaccatctactggttcacagtggaatttggcctgtgcaagcagggagactccatcaaggcctatggagcaggcctgctgtcctcttttggagagctgcagtactgcctgtctgagaagcccaagctactgcctttagagctggaaaagacagccatccagaactacacagtcacagagttccagccactgtactatgtggctgaaagcttcaatgatgccaaggagaaggtgagaaactttgctgccaccatccccagacctttctctgtgagatatgacccttacacccagaggattgaagtgctggacaacacccagcagctgaaaatcctggctgacagcatcaactctgaaattggcatcctgtgttctgccctgcagaagatcaag

SEQ ID NO: 14 - DNA, 1356 bp, synthetic construct
  source 1..1356: mol_type = other DNA
atgagcacagctgtgctggaaaaccctggcttaggcagaaagctgtctgactttggccaagagaccagctacattgaggataactgcaaccagaatggagccatctctctgatcttcagcttgaaggaggaagtgggagccctagccaaggtgctgagactgtttgaggagaatgatgtgaatctgacccacattgaaagcagacctagcagactgaagaaggatgaatatgaattcttcacccacctggacaaaagaagcctaccagccctgaccaacatcatcaagatcctgaggcatgacataggagccacagtgcatgagctgtccagggacaaaaaaaaggacacagtgccttggttccccagaacaatccaggagctggacagatttgccaaccaaatcctcagctatggagctgaactggatgctgaccaccctggcttcaaggacccagtgtacagggccagaagaaagcagtttgctgacatagcctacaactacaggcatggccaacctatccctagggtggagtacatggaggaagaaaagaagacctggggcacagtgttcaagaccctgaaaagcctgtacaagacccatgcctgctatgaatacaaccacatcttccctctgctggagaagtactgtggcttccatgaagacaacatccctcagctggaggatgtgagccagttcctgcagacctgcacaggcttcagactgaggccagtggctggcctgctgagcagcagagacttcctggggggcctggccttcagagtgttccactgcacccagtacatcagacacggcagcaagcctatgtacacccctgaacctgacatctgccatgagctcctgggccatgtgcccctgttctctgatagatcctttgcccagttcagccaggaaattggcctggccagcctgggtgcccctgatgaatacattgaaaagctggcaaccatctactggttcacagttgagtttggcctgtgtaaacagggagacagcatcaaggcctatggagcaggcctgctgtccagctttggagagctgcagtactgtctgagtgagaaacctaagctgctgcccctggagctggagaagacagccatccagaactacacagtgactgagttccagcccctgtactatgttgctgagagcttcaatgatgccaaggagaaggtgagaaactttgcagccaccatccccagacccttctcagtcagatatgacccttacacccagagaattgaggtgcttgacaacacccagcagctgaagatcctggctgactctatcaactctgaaattggcatcctctgctctgccttgcagaaaatcaag

SEQ ID NO: 15 - DNA, 1356 bp, synthetic construct
  source 1..1356: mol_type = other DNA
atgagcacagcagtgctggagaaccctggcctgggcaggaaattgtctgactttggccaggaaacctcctacattgaggacaactgtaaccagaatggagccatcagcctgatcttcagcctgaaagaggaggtgggggccctggccaaggtgctgagactgtttgaggaaaatgatgtcaacctgacccacattgagtccagacccagcagactgaagaaagatgaatatgagttcttcacacacctggacaagagaagcctgcctgccctgaccaacatcatcaagatcctgagacatgacataggagccacagtgcatgagctgagcagggacaagaagaaggacacagtgccctggttcccaagaaccatccaggaactggatagatttgccaaccagatcctgagctatggagctgagctggatgctgaccacccaggcttcaaggaccctgtgtacagagccagaaggaagcagtttgctgacatagcctacaactacagacacggccagcctatccccagagtggaatacatggaagaggagaagaagacctggggcactgtgttcaagacccttaagtctctgtacaagacccatgcctgctatgaatacaaccacatcttccctctgctggagaagtactgtggcttccatgaagacaatatcccccagctggaggatgtgagccagttcctgcaaacctgcactggcttcagactgagacctgtggcaggcctgctgagcagcagagacttcctgggtggcctggccttcagagtcttccactgtacccagtacatcaggcatggcagcaagcccatgtacactccagagcctgacatctgccacgagctgctgggccatgtgcctctgttctcagacagaagctttgcccagttcagccaggagattggcttagcctccttaggagcccctgatgaatacatagaaaaactggccaccatctactggttcacagtggagtttggcctgtgcaagcaaggtgacagcatcaaagcctatggagctggcctgctgagctcctttggagaacttcagtactgcctctctgagaagcctaaactgctgcctctggagctggagaagacagccatccagaactacacagtgacagaattccaacctctgtactatgttgctgagagcttcaatgatgccaaagagaaggtgagaaactttgctgccaccatccccagacccttctctgtgaggtatgacccttacacccagagaattgaagtgctggacaacacccagcagctgaagatcctggctgacagcatcaactctgagataggcatcctgtgctctgccctgcaaaagatcaag

SEQ ID NO: 16 - DNA, 1356 bp, synthetic construct
  source 1..1356: mol_type = other DNA
atgagcacagcagtgcttgagaaccctggcctgggcaggaagctgtctgactttggccaggagactagctacattgaggacaactgcaaccaaaatggagccatcagcctgatcttctccctgaaggaagaggttggagcccttgccaaggtcctgagactgtttgaggagaatgatgtgaacctcacccacatagagagcagacctagcaggctgaaaaaggatgagtatgagttcttcacccacctggacaagaggagcctgccagccttaaccaacatcatcaagatcttgagacatgacattggagccacagtgcatgaactctctagagacaagaagaaggacactgtgccttggttccctagaaccatccaggaactggacagatttgccaaccagatcctgagctatggagctgagctggatgctgaccaccctggcttcaaggaccctgtgtacagagccaggagaaagcagtttgctgacattgcctacaactacagacacggccagcccatccccagagtggagtacatggaggaagagaagaagacctggggcacagtgttcaagaccctgaagagcctgtacaagacccatgcctgttatgaatacaaccacatcttccctctgctggaaaagtactgtggcttccacgaagacaacatcccacagctggaggatgtgtcccagttcctgcagacctgcacaggcttcagactgagacctgtggctggcctgctgagcagcagagacttcctgggaggcctggccttcagggtgttccactgcacccagtacatcagacacggcagcaagcccatgtacaccccagagcctgacatctgccatgagctgctgggccatgtgcctctgttcagtgatagaagctttgcccagttctcccaggaaattggcctggccagcctgggggcccctgatgagtacatagaaaaactggccaccatctactggttcacagttgagtttggcctgtgtaaacagggtgacagcatcaaggcctatggagctggcctgctgagcagctttggagagctgcagtactgcctgtctgagaagcccaagctgctgcctctggagctggaaaagacagctatccaaaactacacagtgacagagttccaacccctgtactatgtggcagaatccttcaatgatgccaaggagaaggtgagaaactttgctgccaccatccctagacccttctctgtgaggtatgacccttacacccagagaatagaagtgctggataacacccagcagctgaaaatcttggctgacagcatcaactctgaaattggcatcctgtgctctgccctgcagaaaatcaaa

SEQ ID NO: 17 - DNA, 1356 bp, synthetic construct
  source 1..1356: mol_type = other DNA
atgagcacagcagtgttggagaaccctggcctgggcaggaaactgtctgactttggccaggaaaccagctacattgaggataactgtaaccagaatggagccatcagcctgatcttcagcctgaaagaggaggtgggggccctggccaaggtgctgagactgtttgaggaaaatgatgtcaacctgacccacattgagtccagacccagcagactcaagaaagatgaatatgagttcttcacacacctggacaagagaagcctgcctgccctgaccaacatcatcaagatcctgagacatgacataggagccacagtgcatgaactgagcagagacaagaagaaggacacagtgccctggttccctagaaccatccaggaactggacagatttgccaaccagatcctgagttatggagctgagctggatgctgaccacccaggcttcaaggaccctgtgtacagagccagaaggaagcagtttgctgacattgcctacaactacagacacggccagcctatccccagagtggaatacatggaagaggagaagaagacctggggcactgtgttcaagacccttaagtctctgtacaaaacccacgcctgctatgaatacaaccacatcttccctctgctggagaagtactgtggcttccacgaagacaatatcccccagctggaggatgtgagccagttcctgcaaacctgcactggcttcagactgagacctgtggcaggcctgctgagcagcagagacttcctgggtggcctggccttcagagtcttccactgtacccagtacatcaggcatggcagcaagcccatgtacacaccagagcctgacatctgccacgagctgctgggccatgtgcctctgttctcagacagaagctttgcccagttctcccaggagattggcttagcctccttaggagcccctgatgaatacatagagaaactggccaccatctactggttcacagtggagtttggcctgtgcaagcaaggtgacagcatcaaggcctatggagctggcctgctgagcagctttggagaacttcagtactgcctctctgagaagcccaaactgctgcctctggaactggagaagacagccatccagaactacacagtgacagaattccaacctctgtactatgttgctgagagcttcaatgatgccaaagagaaggtgagaaactttgctgccaccatccccagacccttctctgtgaggtatgacccttacacccagagaattgaagtgctggataacacccagcagctgaagatcctagctgacagcatcaactctgagataggcatcctgtgctctgccctgcaaaagatcaag

SEQ ID NO: 18 - DNA, 1356 bp, synthetic construct
  source 1..1356: mol_type = other DNA
atgagcacagctgtgctggagaaccctggcctgggcagaaagctgtctgactttggccaggagacctcttacattgaagacaactgcaaccagaatggggccatcagcctgatcttcagtctgaaggaagaagtgggagccctggccaaggtactgagactgtttgaggaaaatgatgtcaaccttacccacattgagagcagacccagcagactgaagaaggatgagtatgagttcttcacccacctggacaaaagatccctgcctgccctgaccaacatcatcaagatcctgagacacgacattggagccacagtgcatgagctcagcagggacaagaagaaggacacagtgccctggttccctagaaccatccaggagctggacagatttgccaaccagatcctgagctatggagcagaactggatgctgaccacccaggcttcaaagaccctgtgtacagggccagaaggaagcagtttgctgacatagcctacaattacagacatggccagcccatccctagagtggagtacatggaggaggaaaagaagacctggggcactgtcttcaaaaccctgaagtccctgtacaaaacccacgcctgctatgagtacaaccacatcttccctctgctggaaaagtactgtggcttccacgaagataacatccctcagttagaggatgtgagccagttcctgcagacatgcacaggcttcagactgagaccagtggcaggcctgctgtcttccagagatttcctggggggcctggccttcagggtgttccactgcacccagtacatcaggcacggcagcaagcctatgtacacccctgagcctgacatctgccatgagctgctgggccacgtgcctctgttctctgacagaagctttgcccagttcagccaggagattggccttgccagcttaggagcccctgatgaatacatagagaagctggccaccatctactggttcacagtggaatttggcctgtgtaagcagggagacagcatcaaggcctatggagctggcctgcttagcagctttggagagctgcagtactgcctgtcagagaagcccaaactgctgccactggaactggaaaagacagccatccaaaactacacagtgacagagttccagcccctgtactatgttgctgagtctttcaatgatgccaaggagaaggtgagaaactttgctgccaccatccccagacccttctcagtgagatatgacccttacacccaaagaatagaggtgctggacaacacccagcagctgaagatcctggcagacagcatcaactctgaaattggcatcctgtgttctgccctgcaaaaaatcaag

SEQ ID NO: 19 - DNA, 1356 bp, synthetic construct
  source 1..1356: mol_type = other DNA
atgagcacagctgtgttggagaacccaggcctgggcaggaagctgtctgactttggccaggaaaccagctacattgaagataactgcaaccagaatggggccatcagcctgatcttcagcctgaaggaagaggtgggagccctggccaaagtgctgagactgtttgaagagaatgatgtgaacctgacccacatagaaagcaggcctagcagactgaaaaaggatgagtatgagttcttcacccacctggacaaaagaagcctgcctgccctgaccaacatcatcaagatcctgagacatgacataggagccacagtgcatgagctgagcagagacaagaagaaggacacagtgccttggttccccaggaccatccaggagctggacagatttgccaaccagatcctgagctatggtgctgaacttgatgctgaccaccctggcttcaaggaccctgtgtacagggccagaagaaaacagtttgctgacatagcctacaactacagacacggccaacccatccccagagtggagtacatggaagaagagaaaaagacctggggcacagtgttcaagacactgaaaagcctgtacaagacccatgcctgctatgaatacaaccacatcttccctctactggaaaagtactgtggcttccacgaagataacatcccccagctggaagatgtgtcccagttcctgcagacctgcacaggcttcagactgcggccagttgctggcctgctgagcagcagagacttcctggggggcttggccttcagagtgttccactgcacccagtacatcagacacggcagcaagcccatgtacacccctgaaccagacatctgtcacgaactgctgggccatgtgcctctgttctctgacagaagctttgcccagttctcccaggagattggccttgccagccttggagcccctgatgaatacattgagaagctagccaccatctactggttcacagtggaatttggcctgtgtaagcagggagatagcatcaaggcctatggagctggcctgctgagcagctttggagagctgcaatactgcctgtctgagaagcctaaactgctccccctggaactggagaagacagccatccagaactacacagtgactgaattccagcccctgtactatgtggctgaatccttcaatgatgccaaggaaaaggtgagaaactttgctgccaccatcccaagaccattctctgtgaggtatgacccctacacccagagaattgaggtcctggacaacacccagcaattaaagatcctggcagactcaatcaactctgagattggcatcctgtgctctgccctgcagaaaatcaaa

SEQ ID NO: 20 - DNA, 1356 bp, synthetic construct
  source 1..1356: mol_type = other DNA
atgtccacagctgtgctggaaaaccctggcctgggcagaaagctgagtgactttggccaagagacctcttacattgaggacaactgcaaccagaatggagccatctccctgatcttcagcctgaaggaggaagtgggagccctggccaaagtcctgaggctgtttgaagagaatgatgtgaacctgacccacattgagtccaggcccagcagactgaagaaggatgaatatgagttcttcacccacctggacaagagaagcctgccagccctgaccaacatcatcaagatcctgagacatgacattggagccacagtgcatgagctgagcagagacaagaaaaaggacacagtgccctggttcccaagaaccatccaggagctggacagatttgccaaccaaatcctgagctatggtgcagaactggatgctgaccaccctggcttcaaggacccagtgtacagagccagaagaaagcaatttgctgacatagcctacaattacaggcacggccagcctatccctagagtggaatacatggaggaggaaaagaagacctggggcacagtgttcaaaaccctgaagagcctgtacaaaacccacgcctgctatgagtacaaccacatcttccctctgctggagaagtactgtggcttccatgaggacaacatccctcagctggaagatgtgagccagttcctgcagacatgcacaggcttcagactgagacctgttgctggcctgctgagcagcagagacttcctggggggcctggccttcagagtcttccactgtacccagtacatcagacacggcagcaaacccatgtacacccctgagcctgacatctgccacgagctgctgggccatgtgcccctgttctctgacagaagctttgcccagttcagccaagaaataggcctggccagcctgggagcccctgatgagtacattgaaaagctggccaccatctactggttcacagtggagtttggcctgtgcaagcagggggacagcatcaaggcctatggagctggcctgctgagcagctttggagaactgcagtactgcctgtctgagaagcctaagctgctgcctctggaactggagaagactgccatccagaattacactgtgacagaattccagcccctgtactatgttgcagagagcttcaatgatgccaaggaaaaggtgaggaactttgctgccaccatccctaggcccttctctgtgagatatgacccttacacccagagaattgaggtgctggacaacacccagcagcttaagatcctggctgatagcatcaactctgagattggcatcctgtgctctgccctgcagaagatcaaa

SEQ ID NO: 21 - DNA, 1356 bp, synthetic construct
  source 1..1356: mol_type = other DNA
atgtccacagctgtgctggagaaccctggcctgggcagaaagctgagtgactttggccaggagaccagctacattgaggacaactgtaaccagaatggggccatcagcctgatcttcagcctgaaggaggaagtgggagcattggccaaggtgctgagactgtttgaagaaaatgatgtcaacctgacccacatagagagcagacctagcaggttaaagaaggatgagtatgaattcttcacccacctggacaaaagaagcctgccagccctgaccaacatcatcaagatcttgagacatgacattggtgccacagtgcatgagctgagcagagacaagaagaaggacacagtcccctggttccctagaaccatccaggagctggacagatttgccaaccagatcctcagctatggagctgagctggatgctgatcaccctggcttcaaggacccagtgtacagagccagaagaaagcagtttgctgacatagcctacaactacagacacggccagcccatccctagagttgagtacatggaggaggaaaaaaagacctggggcactgtgttcaagaccctcaagagcctgtacaagacccatgcctgttatgaatacaaccacatcttccccctgctggagaaatactgtggcttccatgaagacaacatccctcagctggaagatgtcagccagttcctgcagacctgcacaggcttcagactgagacctgtggctggcctgctgagctctagagacttcctgggaggcctggccttcagagtgttccactgcacccaatacatcagacatggcagcaagcccatgtacaccccagaacctgacatctgccacgagctgctgggccatgtgcccctgttctctgacaggagctttgcccaattctctcaggagataggcctggcctccctgggtgcccctgatgagtacattgaaaagctagccaccatctactggttcacagtggaatttggcctgtgcaaacagggagacagcatcaaggcctatggagctggcctgctgagctcatttggagaactgcagtactgcctgtctgagaagcctaagctgctgcccctggaactggagaaaacagccatccagaactacacagtgactgagttccagcccctgtactatgtggctgaaagcttcaatgatgccaaggagaaggtgagaaactttgctgccaccatccccaggcctttctctgtgagatatgacccttacacacaaagaattgaggtgctggacaatacccagcagctgaaaatcctggctgacagcatcaactctgagattggcatcctgtgctctgccctgcagaagatcaaa

SEQ ID NO: 22 - DNA, 1356 bp, synthetic construct
  source 1..1356: mol_type = other DNA
atgtccacagctgtgctggagaaccctggcctgggcagaaagctgagtgactttggccaggagaccagctacatagaagacaactgcaatcagaatggagccatcagcctcatcttcagcctgaaggaggaagtgggagccctggccaaagtgctgagactgtttgaggaaaatgatgtcaacctgacccacattgagagcagacccagcagactgaaaaaggatgagtatgagttcttcacccacctggacaagagaagcctgcctgccctcaccaacatcatcaaaatcctgagacatgacattggagccacagtgcatgaactgtccagagataaaaagaaagacacagtcccctggttccctaggaccatccaggagctggacagatttgccaaccagatcctgtcttatggagcagaactggatgctgaccaccctggcttcaaggaccctgtgtacagggccagaagaaagcagtttgctgacatagcctacaactacagacatggccaacccatccccagagttgaatacatggaggaggaaaagaagacctggggcacagtcttcaagaccctgaaaagcctgtacaagacccacgcctgctatgagtacaaccacatcttccccctgctggaaaagtactgtggcttccacgaggacaacatccctcagctggaggatgtgagccagttcctgcagacctgcacaggcttcagactcagacctgttgctggcctgctgagtagcagagacttcctgggaggcttggccttcagagtgttccactgcacccagtacatcagacacggcagcaagcccatgtacaccccagagcctgacatctgtcatgaactgttaggccatgtgcctctgttctctgaccggagctttgcccaattcagccaggaaattggcctggccagcctgggagccccagatgaatacattgagaagctggccacaatctactggttcacagtggaatttggcctgtgtaagcagggtgacagcatcaaagcctatggtgctggcctgctgagcagctttggagagctgcagtactgcctgtctgaaaagcctaaactgctgcctttggagctggagaagacagccatccagaactacacagtgactgagttccagcccctgtactatgtggctgagagcttcaatgatgccaaggagaaggtgaggaactttgctgccaccatccctagacctttctctgtgagatatgacccctacacccagaggattgaggtgctggacaacacacagcagctgaagatccttgctgacagcatcaactctgagattggcatcctgtgctctgccctgcaaaagatcaag

SEQ ID NO: 23 - DNA, 1356 bp, synthetic construct
  source 1..1356: mol_type = other DNA
atgagcacagctgtcctggagaaccctggcctgggcaggaagctgtctgactttggccaggagacctcttacattgaggataactgcaaccagaatggagccatcagcctgatcttctcccttaaggaagaggtgggagctctggccaaagtgctcagactgtttgaagagaatgatgtgaacctgacccacattgagagcagacctagcaggctgaagaaagatgaatatgaattcttcacccacttggacaagagaagcctccctgccctgaccaacatcatcaaaatcctgaggcatgacataggagccactgttcatgagctcagcagagacaagaagaaagacacagtcccctggttcccaagaaccatccaggagctggacagatttgccaaccagatcctgagctatggggctgaactggatgctgaccaccctggcttcaaggaccctgtgtacagggccagaagaaagcagtttgctgacattgcctacaactacagacatggccaacccatccctagagtggaatacatggaggaagagaagaagacctggggcacagtgttcaaaaccctcaagagcctgtacaagacccacgcatgctatgagtacaaccacatcttccctctgctggagaagtactgtggcttccatgaggacaacatcccccagctggaggatgtgtcccagttcctgcagacctgtacaggcttcaggctgagacctgtggctggcctgctgagctccagagacttcctgggaggcctggccttcagagttttccactgcacccagtacatcagacacggctccaagcccatgtacacccctgaacctgacatctgccatgagctgctgggccacgtccccctgttctctgacagaagctttgcccagttcagccaagaaattggcctggccagcctgggtgcccctgatgagtacattgagaagctggccacaatctactggttcacagtggaatttggcctgtgcaagcagggagactccatcaaggcctatggtgctggcctgctgagcagctttggagagctgcagtactgcctgtcagaaaaacctaagctcctgcctctggagctggaaaaaacagccatccaaaactacacagtgacagagttccagcccctgtactatgtggctgagagcttcaatgatgccaaggagaaggtgaggaactttgcagccaccatccccagacctttctctgtgagatatgacccctacacccagagaatagaggtgctggataacacccagcaactgaagatcctggcagacagcatcaactctgagattggcatcctgtgctctgccctgcagaagatcaag

SEQ ID NO: 24 - DNA, 32 bp, Homo sapiens
  source 1..32: mol_type = genomic DNA
tggacacaggacgctgtggtttctgagccagg

SEQ ID NO: 25 - DNA, 186 bp, Homo sapiens
  source 1..186: mol_type = genomic DNA
gggcgactcagatcccagccagtggacttagcccctgtttgctcctccgataactggggtgaccttggttaatattcaccagcagcctcccccgttgcccctctggatccactgcttaaatacggacgaggacagggccctgtctcctcagcttcaggcaccaccactgacctgggacagtgaatc

SEQ ID NO: 26 - DNA, 206 bp, synthetic construct
  source 1..206: mol_type = other DNA
gtaagtatgcctttcactgcgagaggttctggagaggcttctgagctccccatggcccaggcaggcagcaggtctggggcaggaggggggttgtggagtgccttgactcggggcctggcccccccatctctgtcttgcaggacaattgccgtcttctgtctcgtggggcatcctcctgctggcaggcctgtgctgcctggtccctg

SEQ ID NO: 27 - DNA, 184 bp, synthetic construct
  source 1..184: mol_type = other DNA
gtaagtactagcagctacaatccagctaccattctgcttttattttatggttgggataaggctggattattctgagtccaagctaggcccttttgctaatcatgttcatacctcttatcttcctcccacagctcctgggcaacgtgctggtctgtgtgctggcccatcactttggcaaagaatt

SEQ ID NO: 28 - DNA, 93 bp, synthetic construct
  source 1..93: mol_type = other DNA
ctctaaggtaaatataaaatttttaagtgtataatgtgttaaactactgattctaattgtttctctcttttagattccaacctttggaactga

SEQ ID NO: 29 - DNA, 72 bp, synthetic construct
  source 1..72: mol_type = other DNA
gggggaggctgctggtgaatattaaccaagatcaccccagttaccggaggagcaaacagggactaagttcac

SEQ ID NO: 30 - DNA, 223 bp, synthetic construct
  source 1..223: mol_type = other DNA
gtctgtctgcacatttcgtagagcgagtgttccgatactctaatctccctaggcaaggttcatatttgtgtaggttacttattctccttttgttgactaagtcaataatcagaatcagcaggtttggagtcagcttggcagggatcagcagcctgggttggaaggagggggtataaaagccccttcaccaggagaagccctcacacagatccacaagctcctg

SEQ ID NO: 31 - DNA, 93 bp, synthetic construct
  source 1..93: mol_type = other DNA
aagaggtaagggtttaagttatcgttagttcgtgcaccattaatgtttaattacctggagcacctgcctgaaatcatttttttttcaggttgg

SEQ ID NO: 32 - DNA, 101 bp, synthetic construct
  source 1..101: mol_type = other DNA
gcactgggaggatgttgagtaagatggaaaactactgatgacccttgcagagacagagtattaggacatgtttgaacaggggccgggcgatcagcaggtag

SEQ ID NO: 33 - DNA, 228 bp, synthetic construct
  source 1..228: mol_type = other DNA
gtctgtctgcacatttcgtagagcgagtgttccgatactctaatctccctaggcaaggttcatatttgtgtaggttacttattctccttttgttgactaagtcaataatcagaatcagcaggtttggagtcagcttggcagggatcagcagcctgggttggaaggagggggtataaaagccccttcaccaggagaagccgtcacacagatccacaagctcctgacagg

SEQ ID NO: 34 - DNA, 77 bp, synthetic construct
  source 1..77: mol_type = other DNA
ctaaggtaagttggcgccgtttaagggatggttggttggtggggtattaatgtttaattaccttttttacaggcctg

SEQ ID NO: 35 - DNA, 241 bp, synthetic construct
  source 1..241: mol_type = other DNA
gagggcctatttcccatgattccttcatatttgcatatacgatacaaggctgttagagagataattggaattaatttgactgtaaacacaaagatattagtacaaaatacgtgacgtagaaagtaataatttcttgggtagtttgcagttttaaaattatgttttaaaatggactatcatatgcttaccgtaacttgaaagtatttcgatttcttggctttatatatcttgtggaaaggac

SEQ ID NO: 36 - DNA, 589 bp, synthetic construct
  source 1..589: mol_type = other DNA
aatcaacctctggattacaaaatttgtgaaagattgactggtattcttaactatgttgctccttttacgctatgtggatacgctgctttaatgcctttgtatcatgctattgcttcccgtatggctttcattttctcctccttgtataaatcctggttgctgtctctttatgaggagttgtggcccgttgtcaggcaacgtggcgtggtgtgcactgtgtttgctgacgcaacccccactggttggggcattgccaccacctgtcagctcctttccgggactttcgctttccccctccctattgccacggcggaactcatcgccgcctgccttgcccgctgctggacaggggctcggctgttgggcactgacaattccgtggtgttgtcggggaagctgacgtcctttccatggctgctcgcctgtgttgccacctggattctgcgcgggacgtccttctgctacgtcccttcggccctcaatccagcggaccttccttcccgcggcctgctgccggctctgcggcctcttccgcgtcttcgccttcgccctcagacgagtcggatctccctttgggccgcctccccgc

SEQ ID NO: 37 - DNA, 192 bp, Homo sapiens
  source 1..192: mol_type = genomic DNA
ccctaaaatgggcaaacattgcaagcagcaaacagcaaacacacagccctccctgcctgctgaccttggagctggggcagaggtcagagacctctctgggcccatgccacctccaacatccactcgaccccttggaatttcggtggagaggagcagaggttgtcctggcgtggtttaggtagtgtgagaggg

SEQ ID NO: 38 - DNA, 254 bp, Homo sapiens
  source 1..254: mol_type = genomic DNA
aatgactcctttcggtaagtgcagtggaagctgtacactgcccaggcaaagcgtccgggcagcgtaggcgggcgactcagatcccagccagtggacttagcccctgtttgctcctccgataactggggtgaccttggttaatattcaccagcagcctcccccgttgcccctctggatccactgcttaaatacggacgaggacagggccctgtctcctcagcttcaggcaccaccactgacctgggacagtgaat

SEQ ID NO: 39 - DNA, 1700 bp, synthetic construct
  source 1..1700: mol_type = other DNA
gttcggctttacgtcacgcgagggcggcagggaggacggaatggcggggtttggggtgggtccctcctcgggggagccctgggaaaagaggactgcgtgtgggaagagaaggtggaaatggcgttttggttgacatgtgccgcctgcgagcgtgctgcggggaggggccgagggcagattcgggaatgatggcgcggggtgggggcgtgggggctttctcgggagaggcccttccctggaagtttggggtgcgatggtgaggttctcggggcacctctggaggggcctcggcacggaaagcgaccacctgggagggcgtgtggggaccaggttttgcctttagttttgcacacactgtagttcatctttatggagatgctcatggcctcattgaagccccactacagctctggtagcggtaaccatgcgtatttgacacacgaaggaactagggaaaaggcattaggtcatttcaagccgaaattcacatgtgctagaatccagattccatgctgaccgatgccccaggatatagaaaatgagaatctggtccttaccttcaagaacattcttaaccgtaatcagcctctggtatcttagctccaccctcactggttttttcttgtttgttgaaccggccaagctgctggcctccctcctcaaccgttctgatcatgcttgctaaaatagtcaaaaccccggccagttaaatatgctttagcctgctttattatgattatttttgttgttttggcaatgacctggttacctgttgtttctcccactaaaactttttaagggcaggaatcaccgccgtaactctagcacttagcacagtacttggcttgtaagaggtcctcgatgatggtttgttgaatgaatacattaaataattaaccacttgaaccctaagaaagaagcgattctatttcatattaggcattgtaatgacttaaggtaaagagcagtgctattaacggagtctaactgggaatccagcttgtttgggctatttactagttgtgtggctgtgggcaacttacttcacctctctgggcttaagtcattttatgtatatctgaggtgctggctacctcttggagttattgagaggattataagacagtctatgtgaatcagcaacccttgcatggcccctggcggggaacagtaataatagccatcatcatgtttacttacatagtcctaattagtcttcaaaacagccctgtagcaatggtatgattattaccattttacagatgaggaacctttgaagcctcagagaggctaacagacataccctaggtcatacagttattaagagaaggagctctgtctcgaacctagctctctctctctcgagtaataccagttaaaaaataggctacaaataggtactcaaaaaaatggtagtggctgttgtttttattcagttgctgaggaaaaaatgttgatttttcatctctaaacatcaacttacttaattctgccaatttcttttttttgagacagggtctcactctgtcacctaggatggagtgcagtggcacaatcactgctcactgcagcctcgacttcccgggctcgggtgattctccccaggctcaggggattctcccacttcagcctcccaagtagctgggactacaggtgcgcaccaccatccctggctaatatttgtactttattttatttat

SEQ ID NO: 40 - DNA, 380 bp, Gallus gallus
  source 1..380: mol_type = other DNA
gacattgattattgactagttattaatagtaatcaattacggggtcattagttcatagcccatatatggagttccgcgttacataacttacggtaaatggcccgcctggctgaccgcccaacgacccccgcccattgacgtcaataatgacgtatgttcccatagtaacgccaatagggactttccattgacgtcaatgggtggagtatttacggtaaactgcccacttggcagtacatcaagtgtatcatatgccaagtacgccccctattgacgtcaatgacggtaaatggcccgcctggcattatgcccagtacatgaccttatgggactttcctacttggcagtacatctacgtattagtcatcgctattaccatg

SEQ ID NO: 41 - DNA, 278 bp, Gallus gallus
  source 1..278: mol_type = genomic DNA
tcgaggtgagccccacgttctgcttcactctccccatctcccccccctccccacccccaattttgtatttatttattttttaattattttgtgcagcgatgggggcggggggggggggggggcgcgcgccaggcggggcggggcggggcgaggggcggggcggggcgaggcggagaggtgcggcggcagccaatcagagcggcgcgctccgaaagtttccttttatggcgaggcggcggcggcggcggccctataaaaagcgaagcgcgcggcgggcg

SEQ ID NO: 42 - DNA, 1017 bp, synthetic construct
  source 1..1017: mol_type = other DNA
ggagtcgctgcgcgctgccttcgccccgtgccccgctccgccgccgcctcgcgccgcccgccccggctctgactgaccgcgttactcccacaggtgagcgggcgggacggcccttctcctccgggctgtaattagcgcttggtttaatgacggcttgtttcttttctgtggctgcgtgaaagccttgaggggctccgggagggccctttgtgcggggggagcggctcggggggtgcgtgcgtgtgtgtgtgcgtggggagcgccgcgtgcggctccgcgctgcccggcggctgtgagcgctgcgggcgcggcgcggggctttgtgcgctccgcagtgtgcgcgaggggagcgcggccgggggcggtgccccgcggtgcggggggggctgcgaggggaacaaaggctgcgtgcggggtgtgtgcgtgggggggtgagcagggggtgtgggcgcgtcggtcgggctgcaaccccccctgcacccccctccccgagttgctgagcacggcccggcttcgggtgcggggctccgtacggggcgtggcgcggggctcgccgtgccgggcggggggtggcggcaggtgggggtgccgggcggggcggggccgcctcgggccggggagggctcgggggaggggcgcggcggcccccggagcgccggcggctgtcgaggcgcggcgagccgcagccattgccttttatggtaatcgtgcgagagggcgcagggacttcctttgtcccaaatctgtgcggagccgaaatctgggaggcgccgccgcaccccctctagcgggcgcggggcgaagcggtgcggcgccggcaggaaggaaatgggcggggagggccttcgtgcgtcgccgcgccgccgtccccttctccctctccagcctcggggctgtccgcggggggacggctgccttcgggggggacggggcagggcggggttcggcttctggcgtgtgaccggcggctctagagcctctgctaaccatgttcatgccttcttctttttcctacag

SEQ ID NO: 43 - DNA, 1679 bp, synthetic construct
  source 1..1679: mol_type = other DNA
gtacccattgccaagttctgacaactgtctgtctatagccaattatgcatttcttaaattagaacccccccaatatacccaaatatatatatatgtgtgcatatatatagtaagttgtaacaaagttgtgaattcatacctgaagtatctcaagtgatgcaagttttatgaatttttgtttatgccttttgggaagagttgtattgacaaattttttatgcttaaagtaaaccataaatcaaaaaaataaaatctaggatgcaataaaacaaaacaacttcttgacataagtatggtatgtaaatctgttttgattggaaatcaatttgttatattgccagaattcctgttttagaatacatctctgctgatctgtctgtattcttagactgcatatctgggatgaactctgggcagaattcacatgggcttcctttgaaataaacaagacttttcaaattcttagtcgatctgcagaacctgtagccaggcactgaaccattttgatagatgcagtaatcgttgcaagtgtatatttcaaggagttctggctgggtcctagtttatgcttgtggcagaagcagtgagtaactgggaggaagttggtgagtaagcttcaaggaagaagtcatttttagtactctggatcttcctgattttaaagcactacaaaatggtgcattttcattcttgtcaagtgataacagatatattctgatgagcctgaaatgaatatatattgtatcatttttataatatctagcaaggtttgtattttcctagaacttgaactaaatttcagttcataaaatttataaaatacttagttgttgtaaaatatttttggaatgttcacataggtgacacacaaatgtcccattttcattctttctatagtaaatatgttctgatatgtgaaggtttagcagatgcatcagcatttaatcctagaggatctggcataatcttttcccccaagaatagaaattttttctgcttatgaaagtagtacatgtttctttaaaaacaaatcaatattgacttctgcctgctgtatagcactatgcctccacctggccatgaccaggggcatgtcctggtccacctacctgaaaatgtttgcaaccagcctcctggccatgtgcacaggggctgaagttgtcccacaggtattacgggccaacctgacaatacatgaagttccaccaaagtctgagaactcagaactgagctttggggactgaaagacagcacaaacctcaaatttctcagcactggaaacctcaaaatataactgaattccataaataagattttaagtcttaaatatgtatttttaaatgtattaaaagtcaagctgcttgtatttaagcacctaatacaatgcttaggttgtaaaaggagatgctcaataggtactaactgatatattgagatttaattatggtttgaccaatatttattggaaaccgccaaagcttaaatcatcagcttcttgaatgtgatttgaaaggtaatttagtattgaatagcatgtgagctagagtatttcattctttctggtttatttcttcaaatagactttgaatataatggtgaatgggtattataaattaactaataaaaatgacattgaaaatgaaaaaatatatatattaaagtgtagaaagtgaccaggc

SEQ ID NO: 44 - DNA, 986 bp, synthetic construct
  source 1..986: mol_type = other DNA
aggctcagaggcacacaggagtttctgggctcaccctgcccccttccaacccctcagttcccatcctccagcagctgtttgtgtgctgcctctgaagtccacactgaacaaacttcagcctactcatgtccctaaaatgggcaaacattgcaagcagcaaacagcaaacacacagccctccctgcctgctgaccttggagctggggcagaggtcagagacctctctgggcccatgccacctccaacatccactcgaccccttggaatttcggtggagaggagcagaggttgtcctggcgtggtttaggtagtgtgagaggggtcgacgatcttgctaccagtggaacagccactaaggattctgcagtgagagcagagggccagctaagtggtactctcccagagactgtctgactcacgccaccccctccaccttggacacaggacgctgtggtttctgagccaggtacaatgactcctttcggtaagtgcagtggaagctgtacactgcccaggcaaagcgtccgggcagcgtaggcgggcgactcagatcccagccagtggacttagcccctgtttgctcctccgataactggggtgaccttggttaatattcaccagcagcctcccccgttgcccctctggatccactgcttaaatacggacgaggacagggccctgtctcctcagcttcaggcaccaccactgacctgggacagtgaatcgtaagtatgcctttcactgcgagaggttctggagaggcttctgagctccccatggcccaggcaggcagcaggtctggggcaggaggggggttgtggagtgggtatccgcctgctgaggtgcagggcagatcatcatgtgccttgactcggggcctggcccccccatctctgtcttgcaggacaattgccgtcttctgtctcgtggggcatcctcctgctggcaggcctgtgctgcctggtccctgtctccctggctgagga

SEQ ID NO: 45 - DNA, 764 bp, synthetic construct
  source 1..764: mol_type = other DNA
ccctctcacactacctaaaccacgccaggacaacctctgctcctctccaccgaaattccaaggggtcgagtggatgttggaggtggcatgggcccagagaggtctctgacctctgccccagctccaaggtcagcaggcagggagggctgtgtgtttgctgtttgctgcttgcaatgtttgcccattttagggacatgagtaggctgaagtttgttcagtgtggacttcagaggcagcacacaaacagctgctggaggatgggaactgaggggttggaagggggcagggtgagcccagaaactcctgtgtgcctctgagcctgcagacgcgaaacgtcgactggacacaggacgctgtggtttctgagccagggggcgactcagatcccagccagtggacttagcccctgtttgctcctccgataactggggtgaccttggttaatattcaccagcagcctcccccgttgcccctctggatccactgcttaaatacggacgaggacagggccctgtctcctcagcttcaggcaccaccactgacctgggacagtgaatcgtaagtatgcctttcactgcgagaggttctggagaggcttctgagctccccatggcccaggcaggcagcaggtctggggcaggaggggggttgtggagtgccttgactcggggcctggcccccccatctctgtcttgcaggacaattgccgtcttctgtctcgtggggcatcctcctgctggcaggcctgtgctgcctggtccctg

SEQ ID NO: 46 - DNA, 742 bp, synthetic construct
  source 1..742: mol_type = other DNA
ccctctcacactacctaaaccacgccaggacaacctctgctcctctccaccgaaattccaaggggtcgagtggatgttggaggtggcatgggcccagagaggtctctgacctctgccccagctccaaggtcagcaggcagggagggctgtgtgtttgctgtttgctgcttgcaatgtttgcccattttagggacatgagtaggctgaagtttgttcagtgtggacttcagaggcagcacacaaacagctgctggaggatgggaactgaggggttggaagggggcagggtgagcccagaaactcctgtgtgcctctgagcctgcagacgcgaaacgtcgactggacacaggacgctgtggtttctgagccagggggcgactcagatcccagccagtggacttagcccctgtttgctcctccgataactggggtgaccttggttaatattcaccagcagcctcccccgttgcccctctggatccactgcttaaatacggacgaggacagggccctgtctcctcagcttcaggcaccaccactgacctgggacagtgaatcgtaagtactagcagctacaatccagctaccattctgcttttattttatggttgggataaggctggattattctgagtccaagctaggcccttttgctaatcatgttcatacctcttatcttcctcccacagctcctgggcaacgtgctggtctgtgtgctggcccatcactttggcaaagaatt

SEQ ID NO: 47 - DNA, 545 bp, synthetic construct
  source 1..545: mol_type = other DNA
ccctaaaatgggcaaacattgcaagcagcaaacagcaaacacacagccctccctgcctgctgaccttggagctggggcagaggtcagagacctctctgggcccatgccacctccaacatccactcgaccccttggaatttcggtggagaggagcagaggttgtcctggcgtggtttaggtagtgtgagaggggaatgactcctttcggtaagtgcagtggaagctgtacactgcccaggcaaagcgtccgggcagcgtaggcgggcgactcagatcccagccagtggacttagcccctgtttgctcctccgataactggggtgaccttggttaatattcaccagcagcctcccccgttgcccctctggatccactgcttaaatacggacgaggacagggccctgtctcctcagcttcaggcaccaccactgacctgggacagtgaatccggactctaaggtaaatataaaatttttaagtgtataatgtgttaaactactgattctaattgtttctctcttttagattccaacctttggaactga

SEQ ID NO: 48 - DNA, 400 bp, synthetic construct
  source 1..400: mol_type = other DNA
gggggaggctgctggtgaatattaaccaagatcaccccagttaccggaggagcaaacagggactaagttcacacgcgtggtaccgtctgtctgcacatttcgtagagcgagtgttccgatactctaatctccctaggcaaggttcatatttgtgtaggttacttattctccttttgttgactaagtcaataatcagaatcagcaggtttggagtcagcttggcagggatcagcagcctgggttggaaggagggggtataaaagccccttcaccaggagaagccctcacacagatccacaagctcctgaagaggtaagggtttaagttatcgttagttcgtgcaccattaatgtttaattacctggagcacctgcctgaaatcatttttttttcaggttgg

SEQ ID NO: 49 - DNA, 489 bp, synthetic construct
  source 1..489: mol_type = other DNA
gcactgggaggatgttgagtaagatggaaaactactgatgacccttgcagagacagagtattaggacatgtttgaacaggggccgggcgatcagcaggtagctctagaggatccccgtctgtctgcacatttcgtagagcgagtgttccgatactctaatctccctaggcaaggttcatatttgtgtaggttacttattctccttttgttgactaagtcaataatcagaatcagcaggtttggagtcagcttggcagggatcagcagcctgggttggaaggagggggtataaaagccccttcaccaggagaagccgtcacacagatccacaagctcctgacaggaagctgatcctctaggtgactctcttaaggtagccttgcagaagttggtcgtgaggcactggctagccctaaggtaagttggcgccgtttaagggatggttggttggtggggtattaatgtttaattaccttttttacaggcctg

SEQ ID NO: 50 - DNA, 1676 bp, synthetic construct
  source 1..1676: mol_type = other DNA
gacattgattattgactagttattaatagtaatcaattacggggtcattagttcatagcccatatatggagttccgcgttacataacttacggtaaatggcccgcctggctgaccgcccaacgacccccgcccattgacgtcaataatgacgtatgttcccatagtaacgccaatagggactttccattgacgtcaatgggtggagtatttacggtaaactgcccacttggcagtacatcaagtgtatcatatgccaagtacgccccctattgacgtcaatgacggtaaatggcccgcctggcattatgcccagtacatgaccttatgggactttcctacttggcagtacatctacgtattagtcatcgctattaccatggtcgaggtgagccccacgttctgcttcactctccccatctcccccccctccccacccccaattttgtatttatttattttttaattattttgtgcagcgatgggggcggggggggggggggggcgcgcgccaggcggggcggggcggggcgaggggcggggcggggcgaggcggagaggtgcggcggcagccaatcagagcggcgcgctccgaaagtttccttttatggcgaggcggcggcggcggcggccctataaaaagcgaagcgcgcggcgggcgggagtcgctgcgcgctgccttcgccccgtgccccgctccgccgccgcctcgcgccgcccgccccggctctgactgaccgcgttactcccacaggtgagcgggcgggacggcccttctcctccgggctgtaattagcgcttggtttaatgacggcttgtttcttttctgtggctgcgtgaaagccttgaggggctccgggagggccctttgtgcggggggagcggctcggggggtgcgtgcgtgtgtgtgtgcgtggggagcgccgcgtgcggctccgcgctgcccggcggctgtgagcgctgcgggcgcggcgcggggctttgtgcgctccgcagtgtgcgcgaggggagcgcggccgggggcggtgccccgcggtgcggggggggctgcgaggggaacaaaggctgcgtgcggggtgtgtgcgtgggggggtgagcagggggtgtgggcgcgtcggtcgggctgcaaccccccctgcacccccctccccgagttgctgagcacggcccggcttcgggtgcggggctccgtacggggcgtggcgcggggctcgccgtgccgggcggggggtggcggcaggtgggggtgccgggcggggcggggccgcctcgggccggggagggctcgggggaggggcgcggcggcccccggagcgccggcggctgtcgaggcgcggcgagccgcagccattgccttttatggtaatcgtgcgagagggcgcagggacttcctttgtcccaaatctgtgcggagccgaaatctgggaggcgccgccgcaccccctctagcgggcgcggggcgaagcggtgcggcgccggcaggaaggaaatgggcggggagggccttcgtgcgtcgccgcgccgccgtccccttctccctctccagcctcggggctgtccgcggggggacggctgccttcgggggggacggggcagggcggggttcggcttctggcgtgtgaccggcggctctagagcctctgctaaccatgttcatgccttcttctttttcctacag

SEQ ID NO: 51 - DNA, 11432 bp, synthetic construct
  source 1..11432: mol_type = other DNA
ctgctattaataactatgctcaaaaattgtgtacctttagctttttaatttgtaaaggggttaataaggaatatttgatgtatagtgccttgactagagatcataatcagccataccacatttgtagaggttttacttgctttaaaaaacctcccacacctccccctgaacctgaaacataaaatgaatgcaattgttgttgttctagcttggccactccctctctgcgcgctcgctcgctcactgaggccgggcgaccaaaggtcgcccgacgcccgggctttgcccgggcggcctcagtgagcgagcgagcgcgcagagagggagtggccaactccatcactaggggttcctctcgaggagcttggcccattgcatacgttgtatccatatcataatatgtacatttatattggctcatgtccaacattaccgccatgttactagtgtcgacaggctcagaggcacacaggagtttctgggctcaccctgcccccttccaacccctcagttcccatcctccagcagctgtttgtgtgctgcctctgaagtccacactgaacaaacttcagcctactcatgtccctaaaatgggcaaacattgcaagcagcaaacagcaaacacacagccctccctgcctgctgaccttggagctggggcagaggtcagagacctctctgggcccatgccacctccaacatccactcgaccccttggaatttcggtggagaggagcagaggttgtcctggcgtggtttaggtagtgtgagaggggtcgacgatcttgctaccagtggaacagccactaaggattctgcagtgagagcagagggccagctaagtggtactctcccagagactgtctgactcacgccaccccctccaccttggacacaggacgctgtggtttctgagccaggtacaatgactcctttcggtaagtgcagtggaagctgtacactgcccaggcaaagcgtccgggcagcgtaggcgggcgactcagatcccagccagtggacttagcccctgtttgctcctccgataactggggtgaccttggttaatattcaccagcagcctcccccgttgcccctctggatccactgcttaaatacggacgaggacagggccctgtctcctcagcttcaggcaccaccactgacctgggacagtgaatcgtaagtatgcctttcactgcgagaggttctggagaggcttctgagctccccatggcccaggcaggcagcaggtctggggcaggaggggggttgtggagtgggtatccgcctgctgaggtgcagggcagatcatcatgtgccttgactcggggcctggcccccccatctctgtcttgcaggacaattgccgtcttctgtctcgtggggcatcctcctgctggcaggcctgtgctgcctggtccctgtctccctggctgaggaccgggtaccgccaccatgtccactgcggtcctggaaaacccaggcttgggcaggaaactctctgactttggacaggaaacaagctatattgaagacaactgcaatcaaaatggtgccatatcactgatcttctcactcaaagaagaagttggtgcattggccaaagtattgcgcttatttgaggagaatgatgtaaacctgacccacattgaatctagaccttctcgtttaaagaaagatgagtatgaatttttcacccatttggataaacgtagcctgcctgctctgacaaacatcatcaagatcttgaggcatgacattggtgccactgtccatgagctttcacgagataagaagaaagacacagtgccctggttcccaagaaccattcaagagctggacagatttgccaatcagattctcagctatggagcggaactggatgctgaccaccctggttttaaagatcctgtgtaccgtgcaagacggaagcagtttgctgacattgcctacaactaccgccatgggcagcccatccctcgagtggaatacatggaggaagaaaagaaaacatggggcacagtgttcaagactctgaagtccttgtataaaacccatgcttgctatgagtacaatcacatttttccacttcttgaaaagtactgtggcttccatgaagataacattccccagctggaagacgtttctcagttcctgcagacttgcactggtttccgcctccgacctgtggctggcctgctttcctctcgggatttcttgggtggcctggccttccgagtcttccactgcacacagtacatcagacatggatccaagcccatgtatacccccgaacctgacatctgccatgagctgttgggacatgtgcccttgttttcagatcgcagctttgcccagttttcccaggaaattggccttgcctctctgggtgcacctgatgaatacattgaaaagctcgccacaatttactggtttactgtggagtttgggctctgcaaacaaggagactccataaaggcatatggtgctgggctcctgtcatcctttggtgaattacagtactgcttatcagagaagccaaagcttctccccctggagctggagaagacagccatccaaaattacactgtcacggagttccagcccctctattacgtggcagagagttttaatgatgccaaggagaaagtaaggaactttgctgccacaatacctcggcccttctcagttcgctacgacccatacacccaaaggattgaggtcttggacaatacccagcagcttaagattttggctgattccattaacagtgaaattggaatcctttgcagtgccctccagaaaataaagtaaagatctgcctcgactgtgccttctagttgccagccatctgttgtttgcccctcccccgtgccttccttgaccctggaaggtgccactcccactgtcctttcctaataaaatgaggaaattgcatcgcattgtctgagtaggtgtcattctattctggggggtggggtggggcaggacagcaagggggaggattgggaagacaatagcaggcatgctggggatgcggtgggctctatggggcgcgccgtacccattgccaagttctgacaactgtctgtctatagccaattatgcatttcttaaattagaacccccccaatatacccaaatatatatatatgtgtgcatatatatagtaagttgtaacaaagttgtgaattcatacctgaagtatctcaagtgatgcaagttttatgaatttttgtttatgccttttgggaagagttgtattgacaaattttttatgcttaaagtaaaccataaatcaaaaaaataaaatctaggatgcaataaaacaaaacaacttcttgacataagtatggtatgtaaatctgttttgattggaaatcaatttgttatattgccagaattcctgttttagaatacatctctgctgatctgtctgtattcttagactgcatatctgggatgaactctgggcagaattcacatgggcttcctttgaaataaacaagacttttcaaattcttagtcgatctgcagaacctgtagccaggcactgaaccattttgatagatgcagtaatcgttgcaagtgtatatttcaaggagttctggctgggtcctagtttatgcttgtggcagaagcagtgagtaactgggaggaagttggtgagtaagcttcaaggaagaagtcatttttagtactctggatcttcctgattttaaagcactacaaaatggtgcattttcattcttgtcaagtgataacagatatattctgatgagcctgaaatgaatatatattgtatcatttttataatatctagcaaggtttgtattttcctagaacttgaactaaatttcagttcataaaatttataaaatacttagttgttgtaaaatatttttggaatgttcacataggtgacacacaaatgtcccattttcattctttctatagtaaatatgttctgatatgtgaaggtttagcagatgcatcagcatttaatcctagaggatctggcataatcttttcccccaagaatagaaattttttctgcttatgaaagtagtacatgtttctttaaaaacaaatcaatattgacttctgcctgctgtatagcactatgcctccacctggccatgaccaggggcatgtcctggtccacctacctgaaaatgtttgcaaccagcctcctggccatgtgcacaggggctgaagttgtcccacaggtattacgggccaacctgacaatacatgaagttccaccaaagtctgagaactcagaactgagctttggggactgaaagacagcacaaacctcaaatttctcagcactggaaacctcaaaatataactgaattccataaataagattttaagtcttaaatatgtatttttaaatgtattaaaagtcaagctgcttgtatttaagcacctaatacaatgcttaggttgtaaaaggagatgctcaataggtactaactgatatattgagatttaattatggtttgaccaatatttattggaaaccgccaaagcttaaatcatcagcttcttgaatgtgatttgaaaggtaatttagtattgaatagcatgtgagctagagtatttcattctttctggtttatttcttcaaatagactttgaatataatggtgaatgggtattataaattaactaataaaaatgacattgaaaatgaaaaaatatatatattaaagtgtagaaagtgaccaggcaccggtggatcccctaactacaaggaacccctagtgatggagttggccactccctctctgcgcgctcgctcgctcactgaggccgggcgaccaaaggtcgcccgacgcccgggctttgcccgggcggcctcagtgagcgagcgagcgcgcagagagggagtggccaacaggaagctcctctgtgtcctcataaaccctaacctcctctacttgagaggacattccaatcataggctgcccatccaccctctgtgtcctcctgttaattaggtcacttaacaaaaaggaaattgggtaggggtttttcacagaccgctttctaagggtaattttaaaatatctgggaagtcccttccactgctgtgttccagaagtgttggtaaacagcccacaaatgtcaacagcagaaacatacaagctgtcagctttgcacaagggcccaatctctggaagatccgcgcgtaccgagttctaattcactggccgtcgttttacaacgtcgtgactgggaaaaccctggcgttacccaacttaatcgccttgcagcacatccccctttcgccagctggcgtaatagcgaagaggcccgcaccgatcgcccttcccaacagttgcgcagcctgaatggcgaatggcgcctgatgcggtattttctccttacgcatctgtgcggtatttcacaccgcatatggtgcactctcagtacaatctgctctgatgccgcatagttaagccagccccgacacccgccaacacccgctgacgcgccctgacgggcttgtctgctcccggcatccgcttacagacaagctgtgaccgtctccgggagctgcatgtgtcagaggttttcaccgtcatcaccgaaacgcgcgagacgaaagggcctcgtgatacgcctatttttataggttaatgtcatgataataatggtttcttagacgtcaggtggcacttttcggggaaatgtgcgcggaacccccatttgtttatttttctaaatacattcaaatatgtatccgctcatgagacaataaccctgataaatgcttcaataatattgaaaaaggaagagtatgagccatattcaacgggaaacgtcttgctctaggccgcgattaaattccaacatggatgctgatttatatgggtataaatgggctcgcgataatgtcgggcaatcaggtgcgacaatctatcgattgtatgggaagcccgatgcgccagagttgtttctgaaacatggcaaaggtagcgttgccaatgatgttacagatgagatggtcagactaaactggctgacggaatttatgcctcttccgaccatcaagcattttatccgtactcctgatgatgcatggttactcaccactgcgatccctgggaaaacagcattccaggtattagaagaatatcctgattcaggtgaaaatattgttgatgcgctggcagtgttcctgcgccggttgcattcgattcctgtttgtaattgtccttttaacagcgatcgcgtatttcgtctcgctcaggcgcaatcacgaatgaataacggtttggttgatgcgagtgattttgatgacgagcgtaatggctggcctgttgaacaagtctggaaagaaatgcataaacttttgccattctcaccggattcagtcgtcactcatggtgatttctcacttgataaccttatttttgacgaggggaaattaataggttgtattgatgttggacgagtcggaatcgcagaccgataccaggatcttgccatcctatggaactgcctcggtgagttttctccttcattacagaaacggctttttcaaaaatatggtattgataatcctgatatgaataaattgcagtttcatttgatgctcgatgagtttttctaaaagcttgtgcaatgccacaaagaagagtcaatcgcagacaacattttgaatgcggtcacacgttagcagcatgattgccacggatggcaacatattaacggcatgatattgacttattgaataaaattgggtaaatttgactcaacgatgggttaattcgctcgttgtggtagtgagatgaaaagaggcggcgcttactaccgattccgcctagttggtcacttcgacgtatcgtctggaactccaaccatcgcaggcagagaggtctgcaaaatgcaatcccgaaacagttcgcaggtaatagttagagcctgcataacggtttcgggattttttatatctgcacaacaggtaagagcattgagtcgataatcgtgaagagtcggcgagcctggttagccagtgctctttccgttgtgctgaattaagcgaataccggaagcagaaccggatcaccaaatgcgtacaggcgtcatcgccgcccagcaacagcacaacccaaactgagccgtagccactgtctgtcctgaattcattagtaatagttacgctgcggccttttacacatgaccttcgtgaaagcgggtggcaggaggtcgcgctaacaacctcctgccgttttgcccgtgcatatcggtcacgaacaaatctgattactaaacacagtagcctggatttgttctatcagtaatcgaccttattcctaattaaatagagcaaatccccttattgggggtaagacatgaagatgccagaaaaacatgacctgttggccgccattctcgcggcaaaggaacaaggcatcggggcaatccttgcgtttgcaatggcgtaccttcgcggcagatataatggcggtgcgtttacaaaaacagtaatcgacgcaacgatgtgcgccattatcgcctggttcattcgtgaccttctcgacttcgccggactaagtagcaatctcgcttatataacgagcgtgtttatcggctacatcggtactgactcgattggttcgcttatcaaacgcttcgctgctaaaaaagccggagtagaagatggtagaaatcaataatcaacgtaaggcgttcctcgatatgctggcgtggtcggagggaactgataacggacgtcagaaaaccagaaatcatggttatgacgtcattgtaggcggagagctatttactgattactccgatcaccctcgcaaacttgtcacgctaaacccaaaactcaaatcaacaggcgccggacgctaccagcttctttcccgttggtgggatgcctaccgcaagcagcttggcctgaaagacttctctccgaaaagtcaggacgctgtggcattgcagcagattaaggagcgtggcgctttacctatgattgatcgtggtgatatccgtcaggcaatcgaccgttgcagcaatatctgggcttcactgccgggcgctggttatggtcagttcgagcataaggctgacagcctgattgcaaaattcaaagaagcgggcggaacggtcagagagattgatgtatgagcagagtcaccgcgattatctccgctctggttatctgcatcatcgtctgcctgtcatgggctgttaatcattaccgtgataacgccattacctacaaagcccagcgcgacaaaaatgccagagaactgaagctggcgaacgcggcaattactgacatgcagatgcgtcagcgtgatgttgctgcgctcgatgcaaaatacacgaaggagttagctgatgctaaagctgaaaatgatgctctgcgtgatgatgttgccgctggtcgtcgtcggttgcacatcaaagcagtctgtcagtcagtgcgtgaagccaccaccgcctccggcgtggataatgcagcctccccccgactggcagacaccgctgaacgggattatttcaccctcagagagaggctgatcactatgcaaaaacaactggaaggaacccagaagtatattaatgagcagtgcagatagagttgcccatatcgatgggcaactcatgcaattattgtgagcaatacacacgcgcttccagcggagtataaatgcctaaagtaataaaaccgagcaatccatttacgaatgtttgctgggtttctgttttaacaacattttctgcgccgccacaaattttggctgcatcgacagttttcttctgcccaattccagaaacgaagaaatgatgggtgatggtttcctttggtgctactgctgccggtttgttttgaacagtaaacgtctgttgagcacatcctgtaataagcagggccagcgcagtagcgagtagcatttttttcatggtgttattcccgatgctttttgaagttcgcagaatcgtatgtgtagaaaattaaacaaaccctaaacaatgagttgaaatttcatattgttaatatttattaatgtatgtcaggtgcgatgaatcgtcattgtattcccggattaactatgtccacagccctgacggggaacttctctgcgggagtgtccgggaataattaaaacgatgcacacagggtttagcgcgtacacgtattgcattatgccaacgccccggtgctgacacggaagaaaccggacgttatgatttagcgtggaaagatttgtgtagtgttctgaatgctctcagtaaatagtaatgaattatcaaaggtatagtaatatcttttatgttcatggatatttgtaacccatcggaaaactcctgctttagcaagattttccctgtattgctgaaatgtgatttctcttgatttcaacctatcataggacgtttctataagatgcgtgtttcttgagaatttaacatttacaacctttttaagtccttttattaacacggtgttatcgttttctaacacgatgtgaatattatctgtggctagatagtaaatataatgtgagacgttgtgacgtttgctagcctgtcagaccaagtttactcatatatactttagattgatttaaaacttcatttttaatttaaaaggatctaggtgaagatcctttttgataatctcatgaccaaaatcccttaacgtgagttttcgttccactgagcgtcagaccccgtagaaaagatcaaaggatcttcttgagatcctttttttctgcgcgtaatctgctgcttgcaaacaaaaaaaccaccgctaccagcggtggtttgtttgccggatcaagagctaccaactctttttccgaaggtaactggcttcagcagagcgcagataccaaatactgttcttctagtgtagccgtagttaggccaccacttcaagaactctgtagcaccgcctacatacctcgctctgctaatcctgttaccagtggctgctgccagtggcgataagtcgtgtcttaccgggttggactcaagacgatagttaccggataaggcgcagcggtcgggctgaacggggggttcgtgcacacagcccagcttggagcgaacgacctacaccgaactgagatacctacagcgtgagctatgagaaagcgccacgcttcccgaagggagaaaggcggacaggtatccggtaagcggcagggtcggaacaggagagcgcacgagggagcttccagggggaaacgcctggtatctttatagtcctgtcgggtttcgccacctctgacttgagcgtcgatttttgtgatgctcgtcaggggggcggagcctatggaaaaacgccagcaacgcggcctttttacggttcctggccttttgctggccttttgctcacatgttctttcctgcgttatcccctgattctgtggataaccgtattaccgcctttgagtgagctgataccgctcgccgcagccgaacgaccgagcgcagcgagtcagtgagcgaggaagcggaagagcgcccaatacgcaaaccgcctctccccgcgcgttggccgattcattaatgcagctggcacgacaggtttcccgactggaaagcgggcagtgagcgcaacgcaattaatgtgagttagctcactcattaggcaccccaggctttacactttatgcttccggctcgtatgttgtgtggaattgtgagcggataacaatttcacacaggaaacagctatgaccatgattacgccaagtttgcacgcctgccgttcgacgatttcgcgagttggttcagctgctgcctgaggctggacgacctcgcggagttctaccggcagtgcaaatccgtcggcatccaggaaaccagcagcggctatccgcgcatccatgcccccgaactgcaggagtggggaggcacgatggccgctttggtccggatctttgtgaaggaaccttacttctgtggtgtgacataattggacaaactacctacagagatttaaagctctaaggtaaatataaaatttttaagtgtataatgtgttaaactactgattctaattgtttgtgtattttagattccaacctatggaactgatgaatgggagcagtggtggaatgcctttaatgaggaaaacctgttttgctcagaagaaatgccatctagtgatgatgaggctactgctgactctcaacattctactcctccaaaaaagaagagaaaggtagaagaccccaaggactttccttcagaattgctaagttttttgagtcatgctgtgtttagtaatagaactcttgcttgctttgctatttacaccacaaaggaaaaagctgcactgctatacaagaaaattatggaaaaatattctgtaacctttataagtaggcataacagttataatcataacatactgttttttcttactccacacaggcatagagtgt

SEQ ID NO: 52 - DNA, 11432 bp, synthetic construct
  source 1..11432: mol_type = other DNA
ctgctattaataactatgctcaaaaattgtgtacctttagctttttaatttgtaaaggggttaataaggaatatttgatgtatagtgccttgactagagatcataatcagccataccacatttgtagaggttttacttgctttaaaaaacctcccacacctccccctgaacctgaaacataaaatgaatgcaattgttgttgttctagcttggccactccctctctgcgcgctcgctcgctcactgaggccgggcgaccaaaggtcgcccgacgcccgggctttgcccgggcggcctcagtgagcgagcgagcgcgcagagagggagtggccaactccatcactaggggttcctctcgaggagcttggcccattgcatacgttgtatccatatcataatatgtacatttatattggctcatgtccaacattaccgccatgttactagtgtcgacaggctcagaggcacacaggagtttctgggctcaccctgcccccttccaacccctcagttcccatcctccagcagctgtttgtgtgctgcctctgaagtccacactgaacaaacttcagcctactcatgtccctaaaatgggcaaacattgcaagcagcaaacagcaaacacacagccctccctgcctgctgaccttggagctggggcagaggtcagagacctctctgggcccatgccacctccaacatccactcgaccccttggaatttcggtggagaggagcagaggttgtcctggcgtggtttaggtagtgtgagaggggtcgacgatcttgctaccagtggaacagccactaaggattctgcagtgagagcagagggccagctaagtggtactctcccagagactgtctgactcacgccaccccctccaccttggacacaggacgctgtggtttctgagccaggtacaatgactcctttcggtaagtgcagtggaagctgtacactgcccaggcaaagcgtccgggcagcgtaggcgggcgactcagatcccagccagtggacttagcccctgtttgctcctccgataactggggtgaccttggttaatattcaccagcagcctcccccgttgcccctctggatccactgcttaaatacggacgaggacagggccctgtctcctcagcttcaggcaccaccactgacctgggacagtgaatcgtaagtatgcctttcactgcgagaggttctggagaggcttctgagctccccatggcccaggcaggcagcaggtctggggcaggaggggggttgtggagtgggtatccgcctgctgaggtgcagggcagatcatcatgtgccttgactcggggcctggcccccccatctctgtcttgcaggacaattgccgtcttctgtctcgtggggcatcctcctgctggcaggcctgtgctgcctggtccctgtctccctggctgaggaccgggtaccgccaccatgagcactgctgtgctggagaacccaggcctaggcagaaagctctcagactttggccaggaaaccagctacatagaggacaactgcaaccagaatggagccatctccctgatcttcagcctgaaggaggaagtgggagccctggccaaggtgctgagactgtttgaagagaatgatgtgaacctgacccacattgagagcagacccagcagactgaagaaggatgaatatgagttcttcacccacctggacaaaagaagcctgccagcccttaccaatatcatcaagatcctgagacatgacattggggccacagtgcatgagctgtccagagacaaaaaaaaggacacagtgccatggttccccaggaccatccaggagctggacagatttgccaaccagatcctgagctatggtgctgaactggatgcagatcaccctggcttcaaagaccctgtgtacagggccagaagaaagcagtttgctgacattgcctacaactacaggcatggccagcctatccccagagtggagtacatggaggaggagaagaagacctggggcacagtgttcaagacactgaagagcctgtacaagacccatgcctgctatgaatacaaccacatcttccctctcctggagaaatactgtggcttccatgaggacaacatccctcagctggaggatgtgagccaattcctgcagacctgcacaggcttcagactgagacctgttgctggcctgctgagcagcagagacttccttggaggcttagccttcagagtcttccactgcacccagtacatcagacatggctccaagcctatgtacacccctgagcctgacatctgccatgagctgctgggccatgtccccctgttctctgacagatcctttgcccaattcagccaggaaataggcctggcctccctgggagcccctgatgaatacatagaaaagctggccaccatctactggttcacagtggaatttggcctgtgcaaacagggagatagcatcaaggcctatggagcaggcctgctgagcagctttggagagctgcaatactgtctgtctgagaagcctaagctgctgcccctggaactggaaaagacagccatccagaactacacagtgacagaattccagcctctgtactatgtggctgagagcttcaatgatgccaaagagaaggtgaggaactttgctgccaccatccccaggcctttctctgtgagatatgacccctacacccagaggattgaggtgctggacaacacccagcagctgaagatcttagctgactctatcaactctgaaattggcatcctgtgttctgccctgcagaagatcaagtgaagatctgcctcgactgtgccttctagttgccagccatctgttgtttgcccctcccccgtgccttccttgaccctggaaggtgccactcccactgtcctttcctaataaaatgaggaaattgcatcgcattgtctgagtaggtgtcattctattctggggggtggggtggggcaggacagcaagggggaggattgggaagacaatagcaggcatgctggggatgcggtgggctctatggggcgcgccgtacccattgccaagttctgacaactgtctgtctatagccaattatgcatttcttaaattagaacccccccaatatacccaaatatatatatatgtgtgcatatatatagtaagttgtaacaaagttgtgaattcatacctgaagtatctcaagtgatgcaagttttatgaatttttgtttatgccttttgggaagagttgtattgacaaattttttatgcttaaagtaaaccataaatcaaaaaaataaaatctaggatgcaataaaacaaaacaacttcttgacataagtatggtatgtaaatctgttttgattggaaatcaatttgttatattgccagaattcctgttttagaatacatctctgctgatctgtctgtattcttagactgcatatctgggatgaactctgggcagaattcacatgggcttcctttgaaataaacaagacttttcaaattcttagtcgatctgcagaacctgtagccaggcactgaaccattttgatagatgcagtaatcgttgcaagtgtatatttcaaggagttctggctgggtcctagtttatgcttgtggcagaagcagtgagtaactgggaggaagttggtgagtaagcttcaaggaagaagtcatttttagtactctggatcttcctgattttaaagcactacaaaatggtgcattttcattcttgtcaagtgataacagatatattctgatgagcctgaaatgaatatatattgtatcatttttataatatctagcaaggtttgtattttcctagaacttgaactaaatttcagttcataaaatttataaaatacttagttgttgtaaaatatttttggaatgttcacataggtgacacacaaatgtcccattttcattctttctatagtaaatatgttctgatatgtgaaggtttagcagatgcatcagcatttaatcctagaggatctggcataatcttttcccccaagaatagaaattttttctgcttatgaaagtagtacatgtttctttaaaaacaaatcaatattgacttctgcctgctgtatagcactatgcctccacctggccatgaccaggggcatgtcctggtccacctacctgaaaatgtttgcaaccagcctcctggccatgtgcacaggggctgaagttgtcccacaggtattacgggccaacctgacaatacatgaagttccaccaaagtctgagaactcagaactgagctttggggactgaaagacagcacaaacctcaaatttctcagcactggaaacctcaaaatataactgaattccataaataagattttaagtcttaaatatgtatttttaaatgtattaaaagtcaagctgcttgtatttaagcacctaatacaatgcttaggttgtaaaaggagatgctcaataggtactaactgatatattgagatttaattatggtttgaccaatatttattggaaaccgccaaagcttaaatcatcagcttcttgaatgtgatttgaaaggtaatttagtattgaatagcatgtgagctagagtatttcattctttctggtttatttcttcaaatagactttgaatataatggtgaatgggtattataaattaactaataaaaatgacattgaaaatgaaaaaatatatatattaaagtgtagaaagtgaccaggcaccggtggatcccctaactacaaggaacccctagtgatggagttggccactccctctctgcgcgctcgctcgctcactgaggccgggcgaccaaaggtcgcccgacgcccgggctttgcccgggcggcctcagtgagcgagcgagcgcgcagagagggagtggccaacaggaagctcctctgtgtcctcataaaccctaacctcctctacttgagaggacattccaatcataggctgcccatccaccctctgtgtcctcctgttaattaggtcacttaacaaaaaggaaattgggtaggggtttttcacagaccgctttctaagggtaattttaaaatatctgggaagtcccttccactgctgtgttccagaagtgttggtaaacagcccacaaatgtcaacagcagaaacatacaagctgtcagctttgcacaagggcccaatctctggaagatccgcgcgtaccgagttctaattcactggccgtcgttttacaacgtcgtgactgggaaaaccctggcgttacccaacttaatcgccttgcagcacatccccctttcgccagctggcgtaatagcgaagaggcccgcaccgatcgcccttcccaacagttgcgcagcctgaatggcgaatggcgcctgatgcggtattttctccttacgcatctgtgcggtatttcacaccgcatatggtgcactctcagtacaatctgctctgatgccgcatagttaagccagccccgacacccgccaacacccgctgacgcgccctgacgggcttgtctgctcccggcatccgcttacagacaagctgtgaccgtctccgggagctgcatgtgtcagaggttttcaccgtcatcaccgaaacgcgcgagacgaaagggcctcgtgatacgcctatttttataggttaatgtcatgataataatggtttcttagacgtcaggtggcacttttcggggaaatgtgcgcggaacccccatttgtttatttttctaaatacattcaaatatgtatccgctcatgagacaataaccctgataaatgcttcaataatattgaaaaaggaagagtatgagccatattcaacgggaaacgtcttgctctaggccgcgattaaattccaacatggatgctgatttatatgggtataaatgggctcgcgataatgtcgggcaatcaggtgcgacaatctatcgattgtatgggaagcccgatgcgccagagttgtttctgaaacatggcaaaggtagcgttgccaatgatgttacagatgagatggtcagactaaactggctgacggaatttatgcctcttccgaccatcaagcattttatccgtactcctgatgatgcatggttactcaccactgcgatccctgggaaaacagcattccaggtattagaagaatatcctgattcaggtgaaaatattgttgatgcgctggcagtgttcctgcgccggttgcattcgattcctgtttgtaattgtccttttaacagcgatcgcgtatttcgtctcgctcaggcgcaatcacgaatgaataacggtttggttgatgcgagtgattttgatgacgagcgtaatggctggcctgttgaacaagtctggaaagaaatgcataaacttttgccattctcaccggattcagtcgtcactcatggtgatttctcacttgataaccttatttttgacgaggggaaattaataggttgtattgatgttggacgagtcggaatcgcagaccgataccaggatcttgccatcctatggaactgcctcggtgagttttctccttcattacagaaacggctttttcaaaaatatggtattgataatcctgatatgaataaattgcagtttcatttgatgctcgatgagtttttctaaaagcttgtgcaatgccacaaagaagagtcaatcgcagacaacattttgaatgcggtcacacgttagcagcatgattgccacggatggcaacatattaacggcatgatattgacttattgaataaaattgggtaaatttgactcaacgatgggttaattcgctcgttgtggtagtgagatgaaaagaggcggcgcttactaccgattccgcctagttggtcacttcgacgtatcgtctggaactccaaccatcgcaggcagagaggtctgcaaaatgcaatcccgaaacagttcgcaggtaatagttagagcctgcataacggtttcgggattttttatatctgcacaacaggtaagagcattgagtcgataatcgtgaagagtcggcgagcctggttagccagtgctctttccgttgtgctgaattaagcgaataccggaagcagaaccggatcaccaaatgcgtacaggcgtcatcgccgcccagcaacagcacaacccaaactgagccgtagccactgtctgtcctgaattcattagtaatagttacgctgcggccttttacacatgaccttcgtgaaagcgggtggcaggaggtcgcgctaacaacctcctgccgttttgcccgtgcatatcggtcacgaacaaatctgattactaaacacagtagcctggatttgttctatcagtaatcgaccttattcctaattaaatagagcaaatccccttattgggggtaagacatgaagatgccagaaaaacatgacctgttggccgccattctcgcggcaaaggaacaaggcatcggggcaatccttgcgtttgcaatggcgtaccttcgcggcagatataatggcggtgcgtttacaaaaacagtaatcgacgcaacgatgtgcgccattatcgcctggttcattcgtgaccttctcgacttcgccggactaagtagcaatctcgcttatataacgagcgtgtttatcggctacatcggtactgactcgattggttcgcttatcaaacgcttcgctgctaaaaaagccggagtagaagatggtagaaatcaataatcaacgtaaggcgttcctcgatatgctggcgtggtcggagggaactgataacggacgtcagaaaaccagaaatcatggttatgacgtcattgtaggcggagagctatttactgattactccgatcaccctcgcaaacttgtcacgctaaacccaaaactcaaatcaacaggcgccggacgctaccagcttctttcccgttggtgggatgcctaccgcaagcagcttggcctgaaagacttctctccgaaaagtcaggacgctgtggcattgcagcagattaaggagcgtggcgctttacctatgattgatcgtggtgatatccgtcaggcaatcgaccgttgcagcaatatctgggcttcactgccgggcgctggttatggtcagttcgagcataaggctgacagcctgattgcaaaattcaaagaagcgggcggaacggtcagagagattgatgtatgagcagagtcaccgcgattatctccgctctggttatctgcatcatcgtctgcctgtcatgggctgttaatcattaccgtgataacgccattacctacaaagcccagcgcgacaaaaatgccagagaactgaagctggcgaacgcggcaattactgacatgcagatgcgtcagcgtgatgttgctgcgctcgatgcaaaatacacgaaggagttagctgatgctaaagctgaaaatgatgctctgcgtgatgatgttgccgctggtcgtcgtcggttgcacatcaaagcagtctgtcagtcagtgcgtgaagccaccaccgcctccggcgtggataatgcagcctccccccgactggcagacaccgctgaacgggattatttcaccctcagagagaggctgatcactatgcaaaaacaactggaaggaacccagaagtatattaatgagcagtgcagatagagttgcccatatcgatgggcaactcatgcaattattgtgagcaatacacacgcgcttccagcggagtataaatgcctaaagtaataaaaccgagcaatccatttacgaatgtttgctgggtttctgttttaacaacattttctgcgccgccacaaattttggctgcatcgacagttttcttctgcccaattccagaaacgaagaaatgatgggtgatggtttcctttggtgctactgctgccggtttgttttgaacagtaaacgtctgttgagcacatcctgtaataagcagggccagcgcagtagcgagtagcatttttttcatggtgttattcccgatgctttttgaagttcgcagaatcgtatgtgtagaaaattaaacaaaccctaaacaatgagttgaaatttcatattgttaatatttattaatgtatgtcaggtgcgatgaatcgtcattgtattcccggattaactatgtccacagccctgacggggaacttctctgcgggagtgtccgggaataattaaaacgatgcacacagggtttagcgcgtacacgtattgcattatgccaacgccccggtgctgacacggaagaaaccggacgttatgatttagcgtggaaagatttgtgtagtgttctgaatgctctcagtaaatagtaatgaattatcaaaggtatagtaatatcttttatgttcatggatatttgtaacccatcggaaaactcctgctttagcaagattttccctgtattgctgaaatgtgatttctcttgatttcaacctatcataggacgtttctataagatgcgtgtttcttgagaatttaacatttacaacctttttaagtccttttattaacacggtgttatcgttttctaacacgatgtgaatattatctgtggctagatagtaaatataatgtgagacgttgtgacgtttgctagcctgtcagaccaagtttactcatatatactttagattgatttaaaacttcatttttaatttaaaaggatctaggtgaagatcctttttgataatctcatgaccaaaatcccttaacgtgagttttcgttccactgagcgtcagaccccgtagaaaagatcaaaggatcttcttgagatcctttttttctgcgcgtaatctgctgcttgcaaacaaaaaaaccaccgctaccagcggtggtttgtttgccggatcaagagctaccaactctttttccgaaggtaactggcttcagcagagcgcagataccaaatactgttcttctagtgtagccgtagttaggccaccacttcaagaactctgtagcaccgcctacatacctcgctctgctaatcctgttaccagtggctgctgccagtggcgataagtcgtgtcttaccgggttggactcaagacgatagttaccggataaggcgcagcggtcgggctgaacggggggttcgtgcacacagcccagcttggagcgaacgacctacaccgaactgagatacctacagcgtgagctatgagaaagcgccacgcttcccgaagggagaaaggcggacaggtatccggtaagcggcagggtcggaacaggagagcgcacgagggagcttccagggggaaacgcctggtatctttatagtcctgtcgggtttcgccacctctgacttgagcgtcgatttttgtgatgctcgtcaggggggcggagcctatggaaaaacgccagcaacgcggcctttttacggttcctggccttttgctggccttttgctcacatgttctttcctgcgttatcccctgattctgtggataaccgtattaccgcctttgagtgagctgataccgctcgccgcagccgaacgaccgagcgcagcgagtcagtgagcgaggaagcggaagagcgcccaatacgcaaaccgcctctccccgcgcgttggccgattcattaatgcagctggcacgacaggtttcccgactggaaagcgggcagtgagcgcaacgcaattaatgtgagttagctcactcattaggcaccccaggctttacactttatgcttccggctcgtatgttgtgtggaattgtgagcggataacaatttcacacaggaaacagctatgaccatgattacgccaagtttgcacgcctgccgttcgacgatttcgcgagttggttcagctgctgcctgaggctggacgacctcgcggagttctaccggcagtgcaaatccgtcggcatccaggaaaccagcagcggctatccgcgcatccatgcccccgaactgcaggagtggggaggcacgatggccgctttggtccggatctttgtgaaggaaccttacttctgtggtgtgacataattggacaaactacctacagagatttaaagctctaaggtaaatataaaatttttaagtgtataatgtgttaaactactgattctaattgtttgtgtattttagattccaacctatggaactgatgaatgggagcagtggtggaatgcctttaatgaggaaaacctgttttgctcagaagaaatgccatctagtgatgatgaggctactgctgactctcaacattctactcctccaaaaaagaagagaaaggtagaagaccccaaggactttccttcagaattgctaagttttttgagtcatgctgtgtttagtaatagaactcttgcttgctttgctatttacaccacaaaggaaaaagctgcactgctatacaagaaaattatggaaaaatattctgtaacctttataagtaggcataacagttataatcataacatactgttttttcttactccacacaggcatagagtgt

SEQ ID NO: 53 - DNA, 11432 bp, synthetic construct
  source 1..11432: mol_type = other DNA
ctgctattaataactatgctcaaaaattgtgtacctttagctttttaatttgtaaaggggttaataaggaatatttgatgtatagtgccttgactagagatcataatcagccataccacatttgtagaggttttacttgctttaaaaaacctcccacacctccccctgaacctgaaacataaaatgaatgcaattgttgttgttctagcttggccactccctctctgcgcgctcgctcgctcactgaggccgggcgaccaaaggtcgcccgacgcccgggctttgcccgggcggcctcagtgagcgagcgagcgcgcagagagggagtggccaactccatcactaggggttcctctcgaggagcttggcccattgcatacgttgtatccatatcataatatgtacatttatattggctcatgtccaacattaccgccatgttactagtgtcgacaggctcagaggcacacaggagtttctgggctcaccctgcccccttccaacccctcagttcccatcctccagcagctgtttgtgtgctgcctctgaagtccacactgaacaaacttcagcctactcatgtccctaaaatgggcaaacattgcaagcagcaaacagcaaacacacagccctccctgcctgctgaccttggagctggggcagaggtcagagacctctctgggcccatgccacctccaacatccactcgaccccttggaatttcggtggagaggagcagaggttgtcctggcgtggtttaggtagtgtgagaggggtcgacgatcttgctaccagtggaacagccactaaggattctgcagtgagagcagagggccagctaagtggtactctcccagagactgtctgactcacgccaccccctccaccttggacacaggacgctgtggtttctgagccaggtacaatgactcctttcggtaagtgcagtggaagctgtacactgcccaggcaaagcgtccgggcagcgtaggcgggcgactcagatcccagccagtggacttagcccctgtttgctcctccgataactggggtgaccttggttaatattcaccagcagcctcccccgttgcccctctggatccactgcttaaatacggacgaggacagggccctgtctcctcagcttcaggcaccaccactgacctgggacagtgaatcgtaagtatgcctttcactgcgagaggttctggagaggcttctgagctccccatggcccaggcaggcagcaggtctggggcaggaggggggttgtggagtgggtatccgcctgctgaggtgcagggcagatcatcatgtgccttgactcggggcctggcccccccatctctgtcttgcaggacaattgccgtcttctgtctcgtggggcatcctcctgctggcaggcctgtgctgcctggtccctgtctccctggctgaggaccgggtaccgccaccatgtccacagctgtgctggagaatcctggcctgggcagaaagctgtctgactttggccaggagaccagctacattgaagacaactgcaaccagaatggggccatcagcctcatcttcagcctgaaggaggaggtgggtgccctagccaaggtgctgagactctttgaagaaaatgatgtgaacctgacccacatagaatctagaccttccagactgaagaaggatgaatatgagttcttcacccaccttgacaagagaagcctgccagccctgaccaacatcatcaagatcctgaggcatgacataggagccacagtccatgagctgagcagagacaaaaagaaggacacagtcccttggttccctaggaccatccaggaactggacaggtttgccaaccaaatcctgagctatggagctgagctggatgctgaccacccaggcttcaaagacccagtgtacagagccagaagaaagcagtttgcagacattgcctacaactacagacatggccaacctatccccagggttgaatacatggaagaggaaaagaagacctggggcacagtgttcaagaccctgaagagcctgtacaaaacccatgcctgctatgagtacaaccacatcttccccctgcttgagaaatactgtggcttccatgaggataacatcccccagctggaggatgtgtcccagttcctgcagacctgcactggcttcagactgagacctgtggctggcctcctgagcagcagagacttcctgggaggcctggccttcagagtgttccactgcacccaatacatcaggcatggcagcaaacccatgtacacccctgagcctgatatctgtcatgaactgctgggccatgtgccactgttctctgacagaagctttgcccagttcagccaggagattggcctggccagcctgggagcccctgatgagtacattgagaagctggccaccatctactggttcacagtggaatttggcctgtgcaagcagggagacagcatcaaggcctatggagctggcctgctgagcagctttggagagctgcagtactgcctgtctgagaagcccaaactgctgcctttggagctggagaagacagccatccagaactacacagtgacagagttccagcccctgtactatgtggctgagagcttcaatgatgccaaggaaaaggtgagaaactttgctgccacaatccctaggcctttctctgtgagatatgacccctacacccagagaatagaagtgctggacaacacccagcagctgaaaatcctggctgacagcatcaacagtgagataggcatcctgtgttctgccctgcagaagatcaagtgaagatctgcctcgactgtgccttctagttgccagccatctgttgtttgcccctcccccgtgccttccttgaccctggaaggtgccactcccactgtcctttcctaataaaatgaggaaattgcatcgcattgtctgagtaggtgtcattctattctggggggtggggtggggcaggacagcaagggggaggattgggaagacaatagcaggcatgctggggatgcggtgggctctatggggcgcgccgtacccattgccaagttctgacaactgtctgtctatagccaattatgcatttcttaaattagaacccccccaatatacccaaatatatatatatgtgtgcatatatatagtaagttgtaacaaagttgtgaattcatacctgaagtatctcaagtgatgcaagttttatgaatttttgtttatgccttttgggaagagttgtattgacaaattttttatgcttaaagtaaaccataaatcaaaaaaataaaatctaggatgcaataaaacaaaacaacttcttgacataagtatggtatgtaaatctgttttgattggaaatcaatttgttatattgccagaattcctgttttagaatacatctctgctgatctgtctgtattcttagactgcatatctgggatgaactctgggcagaattcacatgggcttcctttgaaataaacaagacttttcaaattcttagtcgatctgcagaacctgtagccaggcactgaaccattttgatagatgcagtaatcgttgcaagtgtatatttcaaggagttctggctgggtcctagtttatgcttgtggcagaagcagtgagtaactgggaggaagttggtgagtaagcttcaaggaagaagtcatttttagtactctggatcttcctgattttaaagcactacaaaatggtgcattttcattcttgtcaagtgataacagatatattctgatgagcctgaaatgaatatatattgtatcatttttataatatctagcaaggtttgtattttcctagaacttgaactaaatttcagttcataaaatttataaaatacttagttgttgtaaaatatttttggaatgttcacataggtgacacacaaatgtcccattttcattctttctatagtaaatatgttctgatatgtgaaggtttagcagatgcatcagcatttaatcctagaggatctggcataatcttttcccccaagaatagaaattttttctgcttatgaaagtagtacatgtttctttaaaaacaaatcaatattgacttctgcctgctgtatagcactatgcctccacctggccatgaccaggggcatgtcctggtccacctacctgaaaatgtttgcaaccagcctcctggccatgtgcacaggggctgaagttgtcccacaggtattacgggccaacctgacaatacatgaagttccaccaaagtctgagaactcagaactgagctttggggactgaaagacagcacaaacctcaaatttctcagcactggaaacctcaaaatataactgaattccataaataagattttaagtcttaaatatgtatttttaaatgtattaaaagtcaagctgcttgtatttaagcacctaatacaatgcttaggttgtaaaaggagatgctcaataggtactaactgatatattgagatttaattatggtttgaccaatatttattggaaaccgccaaagcttaaatcatcagcttcttgaatgtgatttgaaaggtaatttagtattgaatagcatgtgagctagagtatttcattctttctggtttatttcttcaaatagactttgaatataatggtgaatgggtattataaattaactaataaaaatgacattgaaaatgaaaaaatatatatattaaagtgtagaaagtgaccaggcaccggtggatcccctaactacaaggaacccctagtgatggagttggccactccctctctgcgcgctcgctcgctcactgaggccgggcgaccaaaggtcgcccgacgcccgggctttgcccgggcggcctcagtgagcgagcgagcgcgcagagagggagtggccaacaggaagctcctctgtgtcctcataaaccctaacctcctctacttgagaggacattccaatcataggctgcccatccaccctctgtgtcctcctgttaattaggtcacttaacaaaaaggaaattgggtaggggtttttcacagaccgctttctaagggtaattttaaaatatctgggaagtcccttccactgctgtgttccagaagtgttggtaaacagcccacaaatgtcaacagcagaaacatacaagctgtcagctttgcacaagggcccaatctctggaagatccgcgcgtaccgagttctaattcactggccgtcgttttacaacgtcgtgactgggaaaaccctggcgttacccaacttaatcgccttgcagcacatccccctttcgccagctggcgtaatagcgaagaggcccgcaccgatcgcccttcccaacagttgcgcagcctgaatggcgaatggcgcctgatgcggtattttctccttacgcatctgtgcggtatttcacaccgcatatggtgcactctcagtacaatctgctctgatgccgcatagttaagccagccccgacacccgccaacacccgctgacgcgccctgacgggcttgtctgctcccggcatccgcttacagacaagctgtgaccgtctccgggagctgcatgtgtcagaggttttcaccgtcatcaccgaaacgcgcgagacgaaagggcctcgtgatacgcctatttttataggttaatgtcatgataataatggtttcttagacgtcaggtggcacttttcggggaaatgtgcgcggaacccccatttgtttatttttctaaatacattcaaatatgtatccgctcatgagacaataaccctgataaatgcttcaataatattgaaaaaggaagagtatgagccatattcaacgggaaacgtcttgctctaggccgcgattaaattccaacatggatgctgatttatatgggtataaatgggctcgcgataatgtcgggcaatcaggtgcgacaatctatcgattgtatgggaagcccgatgcgccagagttgtttctgaaacatggcaaaggtagcgttgccaatgatgttacagatgagatggtcagactaaactggctgacggaatttatgcctcttccgaccatcaagcattttatccgtactcctgatgatgcatggttactcaccactgcgatccctgggaaaacagcattccaggtattagaagaatatcctgattcaggtgaaaatattgttgatgcgctggcagtgttcctgcgccggttgcattcgattcctgtttgtaattgtccttttaacagcgatcgcgtatttcgtctcgctcaggcgcaatcacgaatgaataacggtttggttgatgcgagtgattttgatgacgagcgtaatggctggcctgttgaacaagtctggaaagaaatgcataaacttttgccattctcaccggattcagtcgtcactcatggtgatttctcacttgataaccttatttttgacgaggggaaattaataggttgtattgatgttggacgagtcggaatcgcagaccgataccaggatcttgccatcctatggaactgcctcggtgagttttctccttcattacagaaacggctttttcaaaaatatggtattgataatcctgatatgaataaattgcagtttcatttgatgctcgatgagtttttctaaaagcttgtgcaatgccacaaagaagagtcaatcgcagacaacattttgaatgcggtcacacgttagcagcatgattgccacggatggcaacatattaacggcatgatattgacttattgaataaaattgggtaaatttgactcaacgatgggttaattcgctcgttgtggtagtgagatgaaaagaggcggcgcttactaccgattccgcctagttggtcacttcgacgtatcgtctggaactccaaccatcgcaggcagagaggtctgcaaaatgcaatcccgaaacagttcgcaggtaatagttagagcctgcataacggtttcgggattttttatatctgcacaacaggtaagagcattgagtcgataatcgtgaagagtcggcgagcctggttagccagtgctctttccgttgtgctgaattaagcgaataccggaagcagaaccggatcaccaaatgcgtacaggcgtcatcgccgcccagcaacagcacaacccaaactgagccgtagccactgtctgtcctgaattcattagtaatagttacgctgcggccttttacacatgaccttcgtgaaagcgggtggcaggaggtcgcgctaacaacctcctgccgttttgcccgtgcatatcggtcacgaacaaatctgattactaaacacagtagcctggatttgttctatcagtaatcgaccttattcctaattaaatagagcaaatccccttattgggggtaagacatgaagatgccagaaaaacatgacctgttggccgccattctcgcggcaaaggaacaaggcatcggggcaatccttgcgtttgcaatggcgtaccttcgcggcagatataatggcggtgcgtttacaaaaacagtaatcgacgcaacgatgtgcgccattatcgcctggttcattcgtgaccttctcgacttcgccggactaagtagcaatctcgcttatataacgagcgtgtttatcggctacatcggtactgactcgattggttcgcttatcaaacgcttcgctgctaaaaaagccggagtagaagatggtagaaatcaataatcaacgtaaggcgttcctcgatatgctggcgtggtcggagggaactgataacggacgtcagaaaaccagaaatcatggttatgacgtcattgtaggcggagagctatttactgattactccgatcaccctcgcaaacttgtcacgctaaacccaaaactcaaatcaacaggcgccggacgctaccagcttctttcccgttggtgggatgcctaccgcaagcagcttggcctgaaagacttctctccgaaaagtcaggacgctgtggcattgcagcagattaaggagcgtggcgctttacctatgattgatcgtggtgatatccgtcaggcaatcgaccgttgcagcaatatctgggcttcactgccgggcgctggttatggtcagttcgagcataaggctgacagcctgattgcaaaattcaaagaagcgggcggaacggtcagagagattgatgtatgagcagagtcaccgcgattatctccgctctggttatctgcatcatcgtctgcctgtcatgggctgttaatcattaccgtgataacgccattacctacaaagcccagcgcgacaaaaatgccagagaactgaagctggcgaacgcggcaattactgacatgcagatgcgtcagcgtgatgttgctgcgctcgatgcaaaatacacgaaggagttagctgatgctaaagctgaaaatgatgctctgcgtgatgatgttgccgctggtcgtcgtcggttgcacatcaaagcagtctgtcagtcagtgcgtgaagccaccaccgcctccggcgtggataatgcagcctccccccgactggcagacaccgctgaacgggattatttcaccctcagagagaggctgatcactatgcaaaaacaactggaaggaacccagaagtatattaatgagcagtgcagatagagttgcccatatcgatgggcaactcatgcaattattgtgagcaatacacacgcgcttccagcggagtataaatgcctaaagtaataaaaccgagcaatccatttacgaatgtttgctgggtttctgttttaacaacattttctgcgccgccacaaattttggctgcatcgacagttttcttctgcccaattccagaaacgaagaaatgatgggtgatggtttcctttggtgctactgctgccggtttgttttgaacagtaaacgtctgttgagcacatcctgtaataagcagggccagcgcagtagcgagtagcatttttttcatggtgttattcccgatgctttttgaagttcgcagaatcgtatgtgtagaaaattaaacaaaccctaaacaatgagttgaaatttcatattgttaatatttattaatgtatgtcaggtgcgatgaatcgtcattgtattcccggattaactatgtccacagccctgacggggaacttctctgcgggagtgtccgggaataattaaaacgatgcacacagggtttagcgcgtacacgtattgcattatgccaacgccccggtgctgacacggaagaaaccggacgttatgatttagcgtggaaagatttgtgtagtgttctgaatgctctcagtaaatagtaatgaattatcaaaggtatagtaatatcttttatgttcatggatatttgtaacccatcggaaaactcctgctttagcaagattttccctgtattgctgaaatgtgatttctcttgatttcaacctatcataggacgtttctataagatgcgtgtttcttgagaatttaacatttacaacctttttaagtccttttattaacacggtgttatcgttttctaacacgatgtgaatattatctgtggctagatagtaaatataatgtgagacgttgtgacgtttgctagcctgtcagaccaagtttactcatatatactttagattgatttaaaacttcatttttaatttaaaaggatctaggtgaagatcctttttgataatctcatgaccaaaatcccttaacgtgagttttcgttccactgagcgtcagaccccgtagaaaagatcaaaggatcttcttgagatcctttttttctgcgcgtaatctgctgcttgcaaacaaaaaaaccaccgctaccagcggtggtttgtttgccggatcaagagctaccaactctttttccgaaggtaactggcttcagcagagcgcagataccaaatactgttcttctagtgtagccgtagttaggccaccacttcaagaactctgtagcaccgcctacatacctcgctctgctaatcctgttaccagtggctgctgccagtggcgataagtcgtgtcttaccgggttggactcaagacgatagttaccggataaggcgcagcggtcgggctgaacggggggttcgtgcacacagcccagcttggagcgaacgacctacaccgaactgagatacctacagcgtgagctatgagaaagcgccacgcttcccgaagggagaaaggcggacaggtatccggtaagcggcagggtcggaacaggagagcgcacgagggagcttccagggggaaacgcctggtatctttatagtcctgtcgggtttcgccacctctgacttgagcgtcgatttttgtgatgctcgtcaggggggcggagcctatggaaaaacgccagcaacgcggcctttttacggttcctggccttttgctggccttttgctcacatgttctttcctgcgttatcccctgattctgtggataaccgtattaccgcctttgagtgagctgataccgctcgccgcagccgaacgaccgagcgcagcgagtcagtgagcgaggaagcggaagagcgcccaatacgcaaaccgcctctccccgcgcgttggccgattcattaatgcagctggcacgacaggtttcccgactggaaagcgggcagtgagcgcaacgcaattaatgtgagttagctcactcattaggcaccccaggctttacactttatgcttccggctcgtatgttgtgtggaattgtgagcggataacaatttcacacaggaaacagctatgaccatgattacgccaagtttgcacgcctgccgttcgacgatttcgcgagttggttcagctgctgcctgaggctggacgacctcgcggagttctaccggcagtgcaaatccgtcggcatccaggaaaccagcagcggctatccgcgcatccatgcccccgaactgcaggagtggggaggcacgatggccgctttggtccggatctttgtgaaggaaccttacttctgtggtgtgacataattggacaaactacctacagagatttaaagctctaaggtaaatataaaatttttaagtgtataatgtgttaaactactgattctaattgtttgtgtattttagattccaacctatggaactgatgaatgggagcagtggtggaatgcctttaatgaggaaaacctgttttgctcagaagaaatgccatctagtgatgatgaggctactgctgactctcaacattctactcctccaaaaaagaagagaaaggtagaagaccccaaggactttccttcagaattgctaagttttttgagtcatgctgtgtttagtaatagaactcttgcttgctttgctatttacaccacaaaggaaaaagctgcactgctatacaagaaaattatggaaaaatattctgtaacctttataagtaggcataacagttataatcataacatactgttttttcttactccacacaggcatagagtgt

SEQ ID NO: 54 - DNA, 11432 bp, synthetic construct
  source 1..11432: mol_type = other DNA
ctgctattaataactatgctcaaaaattgtgtacctttagctttttaatttgtaaaggggttaataaggaatatttgatgtatagtgccttgactagagatcataatcagccataccacatttgtagaggttttacttgctttaaaaaacctcccacacctccccctgaacctgaaacataaaatgaatgcaattgttgttgttctagcttggccactccctctctgcgcgctcgctcgctcactgaggccgggcgaccaaaggtcgcccgacgcccgggctttgcccgggcggcctcagtgagcgagcgagcgcgcagagagggagtggccaactccatcactaggggttcctctcgaggagcttggcccattgcatacgttgtatccatatcataatatgtacatttatattggctcatgtccaacattaccgccatgttactagtgtcgacaggctcagaggcacacaggagtttctgggctcaccctgcccccttccaacccctcagttcccatcctccagcagctgtttgtgtgctgcctctgaagtccacactgaacaaacttcagcctactcatgtccctaaaatgggcaaacattgcaagcagcaaacagcaaacacacagccctccctgcctgctgaccttggagctggggcagaggtcagagacctctctgggcccatgccacctccaacatccactcgaccccttggaatttcggtggagaggagcagaggttgtcctggcgtggtttaggtagtgtgagaggggtcgacgatcttgctaccagtggaacagccactaaggattctgcagtgagagcagagggccagctaagtggtactctcccagagactgtctgactcacgccaccccctccaccttggacacaggacgctgtggtttctgagccaggtacaatgactcctttcggtaagtgcagtggaagctgtacactgcccaggcaaagcgtccgggcagcgtaggcgggcgactcagatcccagccagtggacttagcccctgtttgctcctccgataactggggtgaccttggttaatattcaccagcagcctcccccgttgcccctctggatccactgcttaaatacggacgaggacagggccctgtctcctcagcttcaggcaccaccactgacctgggacagtgaatcgtaagtatgcctttcactgcgagaggttctggagaggcttctgagctccccatggcccaggcaggcagcaggtctggggcaggaggggggttgtggagtgggtatccgcctgctgaggtgcagggcagatcatcatgtgccttgactcggggcctggcccccccatctctgtcttgcaggacaattgccgtcttctgtctcgtggggcatcctcctgctggcaggcctgtgctgcctggtccctgtctccctggctgaggaccgggtaccgccaccatgagcacagctgtgctggagaaccctggcctgggcaggaaactgtctgactttggccaggagaccagctacatagaggacaactgtaaccagaatggtgccatcagcctgatcttcagcctgaaggaagaagttggagccctggccaaggtgctgaggctgtttgaggagaatgatgtcaacctgacccacatagagagcagaccaagcagactcaaaaaggatgagtatgaattcttcacccacctggacaagaggagcctgcctgccctgaccaacatcatcaagatcctaaggcatgacattggagccacagtgcatgagctgagcagggacaagaagaaggacacagtgccctggttccccagaaccatccaggaactggacagatttgccaaccagatcctgagctatggtgctgagctggatgctgaccaccctggcttcaaggaccctgtgtacagagccagaaggaagcagtttgctgatattgcctacaactacagacatggccagcctatccccagagttgagtacatggaggaagagaaaaaaacctggggcacagtgttcaagaccctgaagtccctgtacaagacccatgcctgctatgagtacaaccacatcttccctctgctggaaaaatactgtggcttccatgaggacaacatccctcagctggaggatgtgtcccagttcctgcagacctgtacaggcttcagactgagacctgtggctggcctgctgagcagcagagatttcctgggaggcctggccttcagagtgttccactgcacccaatacatcagacatggcagcaagcctatgtacaccccagagcctgacatctgccatgagttgctgggccatgtgcccctgttctctgacagatcctttgcccagttctctcaggaaattggcctggccagcctgggagcccctgatgaatacattgaaaagctggccaccatctactggttcacagtggaatttggcctttgcaagcagggggactccatcaaggcctatggagctggcctgctgagcagctttggagaactgcaatactgcctgtctgaaaagcccaagctgctgcctttggagctggagaaaacagccatccagaactacacagtgactgagttccaaccactgtactatgtggctgagagcttcaatgatgccaaggaaaaggtgagaaactttgcagccacaatccctagacccttctcagtgagatatgacccttacacccagagaattgaagtgctggacaacacccagcagctcaagatcctggctgatagcatcaactctgagattggcatcctgtgctctgccctgcagaagatcaaatgaagatctgcctcgactgtgccttctagttgccagccatctgttgtttgcccctcccccgtgccttccttgaccctggaaggtgccactcccactgtcctttcctaataaaatgaggaaattgcatcgcattgtctgagtaggtgtcattctattctggggggtggggtggggcaggacagcaagggggaggattgggaagacaatagcaggcatgctggggatgcggtgggctctatggggcgcgccgtacccattgccaagttctgacaactgtctgtctatagccaattatgcatttcttaaattagaacccccccaatatacccaaatatatatatatgtgtgcatatatatagtaagttgtaacaaagttgtgaattcatacctgaagtatctcaagtgatgcaagttttatgaatttttgtttatgccttttgggaagagttgtattgacaaattttttatgcttaaagtaaaccataaatcaaaaaaataaaatctaggatgcaataaaacaaaacaacttcttgacataagtatggtatgtaaatctgttttgattggaaatcaatttgttatattgccagaattcctgttttagaatacatctctgctgatctgtctgtattcttagactgcatatctgggatgaactctgggcagaattcacatgggcttcctttgaaataaacaagacttttcaaattcttagtcgatctgcagaacctgtagccaggcactgaaccattttgatagatgcagtaatcgttgcaagtgtatatttcaaggagttctggctgggtcctagtttatgcttgtggcagaagcagtgagtaactgggaggaagttggtgagtaagcttcaaggaagaagtcatttttagtactctggatcttcctgattttaaagcactacaaaatggtgcattttcattcttgtcaagtgataacagatatattctgatgagcctgaaatgaatatatattgtatcatttttataatatctagcaaggtttgtattttcctagaacttgaactaaatttcagttcataaaatttataaaatacttagttgttgtaaaatatttttggaatgttcacataggtgacacacaaatgtcccattttcattctttctatagtaaatatgttctgatatgtgaaggtttagcagatgcatcagcatttaatcctagaggatctggcataatcttttcccccaagaatagaaattttttctgcttatgaaagtagtacatgtttctttaaaaacaaatcaatattgacttctgcctgctgtatagcactatgcctccacctggccatgaccaggggcatgtcctggtccacctacctgaaaatgtttgcaaccagcctcctggccatgtgcacaggggctgaagttgtcccacaggtattacgggccaacctgacaatacatgaagttccaccaaagtctgagaactcagaactgagctttggggactgaaagacagcacaaacctcaaatttctcagcactggaaacctcaaaatataactgaattccataaataagattttaagtcttaaatatgtatttttaaatgtattaaaagtcaagctgcttgtatttaagcacctaatacaatgcttaggttgtaaaaggagatgctcaataggtactaactgatatattgagatttaattatggtttgaccaatatttattggaaaccgccaaagcttaaatcatcagcttcttgaatgtgatttgaaaggtaatttagtattgaatagcatgtgagctagagtatttcattctttctggtttatttcttcaaatagactttgaatataatggtgaatgggtattataaattaactaataaaaatgacattgaaaatgaaaaaatatatatattaaagtgtagaaagtgaccaggcaccggtggatcccctaactacaaggaacccctagtgatggagttggccactccctctctgcgcgctcgctcgctcactgaggccgggcgaccaaaggtcgcccgacgcccgggctttgcccgggcggcctcagtgagcgagcgagcgcgcagagagggagtggccaacaggaagctcctctgtgtcctcataaaccctaacctcctctacttgagaggacattccaatcataggctgcccatccaccctctgtgtcctcctgttaattaggtcacttaacaaaaaggaaattgggtaggggtttttcacagaccgctttctaagggtaattttaaaatatctgggaagtcccttccactgctgtgttccagaagtgttggtaaacagcccacaaatgtcaacagcagaaacatacaagctgtcagctttgcacaagggcccaatctctggaagatccgcgcgtaccgagttctaattcactggccgtcgttttacaacgtcgtgactgggaaaaccctggcgttacccaacttaatcgccttgcagcacatccccctttcgccagctggcgtaatagcgaagaggcccgcaccgatcgcccttcccaacagttgcgcagcctgaatggcgaatggcgcctgatgcggtattttctccttacgcatctgtgcggtatttcacaccgcatatggtgcactctcagtacaatctgctctgatgccgcatagttaagccagccccgacacccgccaacacccgctgacgcgccctgacgggcttgtctgctcccggcatccgcttacagacaagctgtgaccgtctccgggagctgcatgtgtcagaggttttcaccgtcatcaccgaaacgcgcgagacgaaagggcctcgtgatacgcctatttttataggttaatgtcatgataataatggtttcttagacgtcaggtggcacttttcggggaaatgtgcgcggaacccccatttgtttatttttctaaatacattcaaatatgtatccgctcatgagacaataaccctgataaatgcttcaataatattgaaaaaggaagagtatgagccatattcaacgggaaacgtcttgctctaggccgcgattaaattccaacatggatgctgatttatatgggtataaatgggctcgcgataatgtcgggcaatcaggtgcgacaatctatcgattgtatgggaagcccgatgcgccagagttgtttctgaaacatggcaaaggtagcgttgccaatgatgttacagatgagatggtcagactaaactggctgacggaatttatgcctcttccgaccatcaagcattttatccgtactcctgatgatgcatggttactcaccactgcgatccctgggaaaacagcattccaggtattagaagaatatcctgattcaggtgaaaatattgttgatgcgctggcagtgttcctgcgccggttgcattcgattcctgtttgtaattgtccttttaacagcgatcgcgtatttcgtctcgctcaggcgcaatcacgaatgaataacggtttggttgatgcgagtgattttgatgacgagcgtaatggctggcctgttgaacaagtctggaaagaaatgcataaacttttgccattctcaccggattcagtcgtcactcatggtgatttctcacttgataaccttatttttgacgaggggaaattaataggttgtattgatgttggacgagtcggaatcgcagaccgataccaggatcttgccatcctatggaactgcctcggtgagttttctccttcattacagaaacggctttttcaaaaatatggtattgataatcctgatatgaataaattgcagtttcatttgatgctcgatgagtttttctaaaagcttgtgcaatgccacaaagaagagtcaatcgcagacaacattttgaatgcggtcacacgttagcagcatgattgccacggatggcaacatattaacggcatgatattgacttattgaataaaattgggtaaatttgactcaacgatgggttaattcgctcgttgtggtagtgagatgaaaagaggcggcgcttactaccgattccgcctagttggtcacttcgacgtatcgtctggaactccaaccatcgcaggcagagaggtctgcaaaatgcaatcccgaaacagttcgcaggtaatagttagagcctgcataacggtttcgggattttttatatctgcacaacaggtaagagcattgagtcgataatcgtgaagagtcggcgagcctggttagccagtgctctttccgttgtgctgaattaagcgaataccggaagcagaaccggatcaccaaatgcgtacaggcgtcatcgccgcccagcaacagcacaacccaaactgagccgtagccactgtctgtcctgaattcattagtaatagttacgctgcggccttttacacatgaccttcgtgaaagcgggtggcaggaggtcgcgctaacaacctcctgccgttttgcccgtgcatatcggtcacgaacaaatctgattactaaacacagtagcctggatttgttctatcagtaatcgaccttattcctaattaaatagagcaaatccccttattgggggtaagacatgaagatgccagaaaaacatgacctgttggccgccattctcgcggcaaaggaacaaggcatcggggcaatccttgcgtttgcaatggcgtaccttcgcggcagatataatggcggtgcgtttacaaaaacagtaatcgacgcaacgatgtgcgccattatcgcctggttcattcgtgaccttctcgacttcgccggactaagtagcaatctcgcttatataacgagcgtgtttatcggctacatcggtactgactcgattggttcgcttatcaaacgcttcgctgctaaaaaagccggagtagaagatggtagaaatcaataatcaacgtaaggcgttcctcgatatgctggcgtggtcggagggaactgataacggacgtcagaaaaccagaaatcatggttatgacgtcattgtaggcggagagctatttactgattactccgatcaccctcgcaaacttgtcacgctaaacccaaaactcaaatcaacaggcgccggacgctaccagcttctttcccgttggtgggatgcctaccgcaagcagcttggcctgaaagacttctctccgaaaagtcaggacgctgtggcattgcagcagattaaggagcgtggcgctttacctatgattgatcgtggtgatatccgtcaggcaatcgaccgttgcagcaatatctgggcttcactgccgggcgctggttatggtcagttcgagcataaggctgacagcctgattgcaaaattcaaagaagcgggcggaacggtcagagagattgatgtatgagcagagtcaccgcgattatctccgctctggttatctgcatcatcgtctgcctgtcatgggctgttaatcattaccgtgataacgccattacctacaaagcccagcgcgacaaaaatgccagagaactgaagctggcgaacgcggcaattactgacatgcagatgcgtcagcgtgatgttgctgcgctcgatgcaaaatacacgaaggagttagctgatgctaaagctgaaaatgatgctctgcgtgatgatgttgccgctggtcgtcgtcggttgcacatcaaagcagtctgtcagtcagtgcgtgaagccaccaccgcctccggcgtggataatgcagcctccccccgactggcagacaccgctgaacgggattatttcaccctcagagagaggctgatcactatgcaaaaacaactggaaggaacccagaagtatattaatgagcagtgcagatagagttgcccatatcgatgggcaactcatgcaattattgtgagcaatacacacgcgcttccagcggagtataaatgcctaaagtaataaaaccgagcaatccatttacgaatgtttgctgggtttctgttttaacaacattttctgcgccgccacaaattttggctgcatcgacagttttcttctgcccaattccagaaacgaagaaatgatgggtgatggtttcctttggtgctactgctgccggtttgttttgaacagtaaacgtctgttgagcacatcctgtaataagcagggccagcgcagtagcgagtagcatttttttcatggtgttattcccgatgctttttgaagttcgcagaatcgtatgtgtagaaaattaaacaaaccctaaacaatgagttgaaatttcatattgttaatatttattaatgtatgtcaggtgcgatgaatcgtcattgtattcccggattaactatgtccacagccctgacggggaacttctctgcgggagtgtccgggaataattaaaacgatgcacacagggtttagcgcgtacacgtattgcattatgccaacgccccggtgctgacacggaagaaaccggacgttatgatttagcgtggaaagatttgtgtagtgttctgaatgctctcagtaaatagtaatgaattatcaaaggtatagtaatatcttttatgttcatggatatttgtaacccatcggaaaactcctgctttagcaagattttccctgtattgctgaaatgtgatttctcttgatttcaacctatcataggacgtttctataagatgcgtgtttcttgagaatttaacatttacaacctttttaagtccttttattaacacggtgttatcgttttctaacacgatgtgaatattatctgtggctagatagtaaatataatgtgagacgttgtgacgtttgctagcctgtcagaccaagtttactcatatatactttagattgatttaaaacttcatttttaatttaaaaggatctaggtgaagatcctttttgataatctcatgaccaaaatcccttaacgtgagttttcgttccactgagcgtcagaccccgtagaaaagatcaaaggatcttcttgagatcctttttttctgcgcgtaatctgctgcttgcaaacaaaaaaaccaccgctaccagcggtggtttgtttgccggatcaagagctaccaactctttttccgaaggtaactggcttcagcagagcgcagataccaaatactgttcttctagtgtagccgtagttaggccaccacttcaagaactctgtagcaccgcctacatacctcgctctgctaatcctgttaccagtggctgctgccagtggcgataagtcgtgtcttaccgggttggactcaagacgatagttaccggataaggcgcagcggtcgggctgaacggggggttcgtgcacacagcccagcttggagcgaacgacctacaccgaactgagatacctacagcgtgagctatgagaaagcgccacgcttcccgaagggagaaaggcggacaggtatccggtaagcggcagggtcggaacaggagagcgcacgagggagcttccagggggaaacgcctggtatctttatagtcctgtcgggtttcgccacctctgacttgagcgtcgatttttgtgatgctcgtcaggggggcggagcctatggaaaaacgccagcaacgcggcctttttacggttcctggccttttgctggccttttgctcacatgttctttcctgcgttatcccctgattctgtggataaccgtattaccgcctttgagtgagctgataccgctcgccgcagccgaacgaccgagcgcagcgagtcagtgagcgaggaagcggaagagcgcccaatacgcaaaccgcctctccccgcgcgttggccgattcattaatgcagctggcacgacaggtttcccgactggaaagcgggcagtgagcgcaacgcaattaatgtgagttagctcactcattaggcaccccaggctttacactttatgcttccggctcgtatgttgtgtggaattgtgagcggataacaatttcacacaggaaacagctatgaccatgattacgccaagtttgcacgcctgccgttcgacgatttcgcgagttggttcagctgctgcctgaggctggacgacctcgcggagttctaccggcagtgcaaatccgtcggcatccaggaaaccagcagcggctatccgcgcatccatgcccccgaactgcaggagtggggaggcacgatggccgctttggtccggatctttgtgaaggaaccttacttctgtggtgtgacataattggacaaactacctacagagatttaaagctctaaggtaaatataaaatttttaagtgtataatgtgttaaactactgattctaattgtttgtgtattttagattccaacctatggaactgatgaatgggagcagtggtggaatgcctttaatgaggaaaacctgttttgctcagaagaaatgccatctagtgatgatgaggctactgctgactctcaacattctactcctccaaaaaagaagagaaaggtagaagaccccaaggactttccttcagaattgctaagttttttgagtcatgctgtgtttagtaatagaactcttgcttgctttgctatttacaccacaaaggaaaaagctgcactgctatacaagaaaattatggaaaaatattctgtaacctttataagtaggcataacagttataatcataacatactgttttttcttactccacacaggcatagagtgt

SEQ ID NO: 55 - DNA, 11432 bp, synthetic construct
  source 1..11432: mol_type = other DNA
ctgctattaataactatgctcaaaaattgtgtacctttagctttttaatttgtaaaggggttaataaggaatatttgatgtatagtgccttgactagagatcataatcagccataccacatttgtagaggttttacttgctttaaaaaacctcccacacctccccctgaacctgaaacataaaatgaatgcaattgttgttgttctagcttggccactccctctctgcgcgctcgctcgctcactgaggccgggcgaccaaaggtcgcccgacgcccgggctttgcccgggcggcctcagtgagcgagcgagcgcgcagagagggagtggccaactccatcactaggggttcctctcgaggagcttggcccattgcatacgttgtatccatatcataatatgtacatttatattggctcatgtccaacattaccgccatgttactagtgtcgacaggctcagaggcacacaggagtttctgggctcaccctgcccccttccaacccctcagttcccatcctccagcagctgtttgtgtgctgcctctgaagtccacactgaacaaacttcagcctactcatgtccctaaaatgggcaaacattgcaagcagcaaacagcaaacacacagccctccctgcctgctgaccttggagctggggcagaggtcagagacctctctgggcccatgccacctccaacatccactcgaccccttggaatttcggtggagaggagcagaggttgtcctggcgtggtttaggtagtgtgagaggggtcgacgatcttgctaccagtggaacagccactaaggattctgcagtgagagcagagggccagctaagtggtactctcccagagactgtctgactcacgccaccccctccaccttggacacaggacgctgtggtttctgagccaggtacaatgactcctttcggtaagtgcagtggaagctgtacactgcccaggcaaagcgtccgggcagcgtaggcgggcgactcagatcccagccagtggacttagcccctgtttgctcctccgataactggggtgaccttggttaatattcaccagcagcctcccccgttgcccctctggatccactgcttaaatacggacgaggacagggccctgtctcctcagcttcaggcaccaccactgacctgggacagtgaatcgtaagtatgcctttcactgcgagaggttctggagaggcttctgagctccccatggcccaggcaggcagcaggtctggggcaggaggggggttgtggagtgggtatccgcctgctgaggtgcagggcagatcatcatgtgccttgactcggggcctggcccccccatctctgtcttgcaggacaattgccgtcttctgtctcgtggggcatcctcctgctggcaggcctgtgctgcctggtccctgtctccctggctgaggaccgggtaccgccaccatgagcacagctgtgctggagaaccctggcctgggcagaaaactgtctgactttggccaggaaacctcctacatagaagacaactgcaaccagaatggagccatcagcctgatcttcagcctgaaggaggaggtaggtgccctggccaaggtgctgagactgtttgaggagaatgatgtgaacctaacccacattgagagcaggcctagcagactgaagaaggatgaatatgagttcttcacccaccttgacaaaagatcactccctgccctgaccaacatcatcaagatcctgagacatgatataggagccactgtgcatgaactgagcagggacaagaagaaggacacagtgccctggttccccagaacaatccaggagctggacagatttgccaaccagatcctgagctatggagcagaactggatgctgaccacccaggcttcaaggaccctgtgtacagagccagaagaaagcagtttgctgacattgcctacaactacagacatggccagcccatccccagggttgaatacatggaggaggaaaagaagacctggggcacagtgttcaaaaccctgaaatccctgtacaaaacccatgcctgttatgaatacaaccacatcttccccctgcttgagaagtactgtggcttccatgaagataacatccctcagctggaggatgtgagccagttcctgcagacctgcacaggcttcagactgagacctgtggctggcctgctgagcagcagggacttcttaggaggcctggccttcagagtgttccactgcacccagtacatcagacatggcagcaagcccatgtacacccctgagcctgacatctgccatgagctgctgggccatgtccctctgttctctgacagaagctttgcccaattctcccaggagattggcctggccagccttggggccccagatgagtacattgagaagctggccaccatctactggttcacagtggagtttggcctgtgcaaacagggagacagcatcaaggcctatggagctggcctgctgagcagctttggagaactgcagtactgtctgagtgaaaagcctaagctgctgccactggagctggagaagacagccatccaaaactacacagtgacagagttccagcctctgtactatgtggctgaaagcttcaatgatgccaaggaaaaggtgagaaactttgctgccaccatccctaggcctttctctgtgagatatgacccctacacccaaagaattgaggtcctggacaacacccagcagttaaaaatcctggctgactctatcaactctgaaattggcatcctgtgctctgccctgcagaagatcaagtgaagatctgcctcgactgtgccttctagttgccagccatctgttgtttgcccctcccccgtgccttccttgaccctggaaggtgccactcccactgtcctttcctaataaaatgaggaaattgcatcgcattgtctgagtaggtgtcattctattctggggggtggggtggggcaggacagcaagggggaggattgggaagacaatagcaggcatgctggggatgcggtgggctctatggggcgcgccgtacccattgccaagttctgacaactgtctgtctatagccaattatgcatttcttaaattagaacccccccaatatacccaaatatatatatatgtgtgcatatatatagtaagttgtaacaaagttgtgaattcatacctgaagtatctcaagtgatgcaagttttatgaatttttgtttatgccttttgggaagagttgtattgacaaattttttatgcttaaagtaaaccataaatcaaaaaaataaaatctaggatgcaataaaacaaaacaacttcttgacataagtatggtatgtaaatctgttttgattggaaatcaatttgttatattgccagaattcctgttttagaatacatctctgctgatctgtctgtattcttagactgcatatctgggatgaactctgggcagaattcacatgggcttcctttgaaataaacaagacttttcaaattcttagtcgatctgcagaacctgtagccaggcactgaaccattttgatagatgcagtaatcgttgcaagtgtatatttcaaggagttctggctgggtcctagtttatgcttgtggcagaagcagtgagtaactgggaggaagttggtgagtaagcttcaaggaagaagtcatttttagtactctggatcttcctgattttaaagcactacaaaatggtgcattttcattcttgtcaagtgataacagatatattctgatgagcctgaaatgaatatatattgtatcatttttataatatctagcaaggtttgtattttcctagaacttgaactaaatttcagttcataaaatttataaaatacttagttgttgtaaaatatttttggaatgttcacataggtgacacacaaatgtcccattttcattctttctatagtaaatatgttctgatatgtgaaggtttagcagatgcatcagcatttaatcctagaggatctggcataatcttttcccccaagaatagaaattttttctgcttatgaaagtagtacatgtttctttaaaaacaaatcaatattgacttctgcctgctgtatagcactatgcctccacctggccatgaccaggggcatgtcctggtccacctacctgaaaatgtttgcaaccagcctcctggccatgtgcacaggggctgaagttgtcccacaggtattacgggccaacctgacaatacatgaagttccaccaaagtctgagaactcagaactgagctttggggactgaaagacagcacaaacctcaaatttctcagcactggaaacctcaaaatataactgaattccataaataagattttaagtcttaaatatgtatttttaaatgtattaaaagtcaagctgcttgtatttaagcacctaatacaatgcttaggttgtaaaaggagatgctcaataggtactaactgatatattgagatttaattatggtttgaccaatatttattggaaaccgccaaagcttaaatcatcagcttcttgaatgtgatttgaaaggtaatttagtattgaatagcatgtgagctagagtatttcattctttctggtttatttcttcaaatagactttgaatataatggtgaatgggtattataaattaactaataaaaatgacattgaaaatgaaaaaatatatatattaaagtgtagaaagtgaccaggcaccggtggatcccctaactacaaggaacccctagtgatggagttggccactccctctctgcgcgctcgctcgctcactgaggccgggcgaccaaaggtcgcccgacgcccgggctttgcccgggcggcctcagtgagcgagcgagcgcgcagagagggagtggccaacaggaagctcctctgtgtcctcataaaccctaacctcctctacttgagaggacattccaatcataggctgcccatccaccctctgtgtcctcctgttaattaggtcacttaacaaaaaggaaattgggtaggggtttttcacagaccgctttctaagggtaattttaaaatatctgggaagtcccttccactgctgtgttccagaagtgttggtaaacagcccacaaatgtcaacagcagaaacatacaagctgtcagctttgcacaagggcccaatctctggaagatccgcgcgtaccgagttctaattcactggccgtcgttttacaacgtcgtgactgggaaaaccctggcgttacccaacttaatcgccttgcagcacatccccctttcgccagctggcgtaatagcgaagaggcccgcaccgatcgcccttcccaacagttgcgcagcctgaatggcgaatggcgcctgatgcggtattttctccttacgcatctgtgcggtatttcacaccgcatatggtgcactctcagtacaatctgctctgatgccgcatagttaagccagccccgacacccgccaacacccgctgacgcgccctgacgggcttgtctgctcccggcatccgcttacagacaagctgtgaccgtctccgggagctgcatgtgtcagaggttttcaccgtcatcaccgaaacgcgcgagacgaaagggcctcgtgatacgcctatttttataggttaatgtcatgataataatggtttcttagacgtcaggtggcacttttcggggaaatgtgcgcggaacccccatttgtttatttttctaaatacattcaaatatgtatccgctcatgagacaataaccctgataaatgcttcaataatattgaaaaaggaagagtatgagccatattcaacgggaaacgtcttgctctaggccgcgattaaattccaacatggatgctgatttatatgggtataaatgggctcgcgataatgtcgggcaatcaggtgcgacaatctatcgattgtatgggaagcccgatgcgccagagttgtttctgaaacatggcaaaggtagcgttgccaatgatgttacagatgagatggtcagactaaactggctgacggaatttatgcctcttccgaccatcaagcattttatccgtactcctgatgatgcatggttactcaccactgcgatccctgggaaaacagcattccaggtattagaagaatatcctgattcaggtgaaaatattgttgatgcgctggcagtgttcctgcgccggttgcattcgattcctgtttgtaattgtccttttaacagcgatcgcgtatttcgtctcgctcaggcgcaatcacgaatgaataacggtttggttgatgcgagtgattttgatgacgagcgtaatggctggcctgttgaacaagtctggaaagaaatgcataaacttttgccattctcaccggattcagtcgtcactcatggtgatttctcacttgataaccttatttttgacgaggggaaattaataggttgtattgatgttggacgagtcggaatcgcagaccgataccaggatcttgccatcctatggaactgcctcggtgagttttctccttcattacagaaacggctttttcaaaaatatggtattgataatcctgatatgaataaattgcagtttcatttgatgctcgatgagtttttctaaaagcttgtgcaatgccacaaagaagagtcaatcgcagacaacattttgaatgcggtcacacgttagcagcatgattgccacggatggcaacatattaacggcatgatattgacttattgaataaaattgggtaaatttgactcaacgatgggttaattcgctcgttgtggtagtgagatgaaaagaggcggcgcttactaccgattccgcctagttggtcacttcgacgtatcgtctggaactccaaccatcgcaggcagagaggtctgcaaaatgcaatcccgaaacagttcgcaggtaatagttagagcctgcataacggtttcgggattttttatatctgcacaacaggtaagagcattgagtcgataatcgtgaagagtcggcgagcctggttagccagtgctctttccgttgtgctgaattaagcgaataccggaagcagaaccggatcaccaaatgcgtacaggcgtcatcgccgcccagcaacagcacaacccaaactgagccgtagccactgtctgtcctgaattcattagtaatagttacgctgcggccttttacacatgaccttcgtgaaagcgggtggcaggaggtcgcgctaacaacctcctgccgttttgcccgtgcatatcggtcacgaacaaatctgattactaaacacagtagcctggatttgttctatcagtaatcgaccttattcctaattaaatagagcaaatccccttattgggggtaagacatgaagatgccagaaaaacatgacctgttggccgccattctcgcggcaaaggaacaaggcatcggggcaatccttgcgtttgcaatggcgtaccttcgcggcagatataatggcggtgcgtttacaaaaacagtaatcgacgcaacgatgtgcgccattatcgcctggttcattcgtgaccttctcgacttcgccggactaagtagcaatctcgcttatataacgagcgtgtttatcggctacatcggtactgactcgattggttcgcttatcaaacgcttcgctgctaaaaaagccggagtagaagatggtagaaatcaataatcaacgtaaggcgttcctcgatatgctggcgtggtcggagggaactgataacggacgtcagaaaaccagaaatcatggttatgacgtcattgtaggcggagagctatttactgattactccgatcaccctcgcaaacttgtcacgctaaacccaaaactcaaatcaacaggcgccggacgctaccagcttctttcccgttggtgggatgcctaccgcaagcagcttggcctgaaagacttctctccgaaaagtcaggacgctgtggcattgcagcagattaaggagcgtggcgctttacctatgattgatcgtggtgatatccgtcaggcaatcgaccgttgcagcaatatctgggcttcactgccgggcgctggttatggtcagttcgagcataaggctgacagcctgattgcaaaattcaaagaagcgggcggaacggtcagagagattgatgtatgagcagagtcaccgcgattatctccgctctggttatctgcatcatcgtctgcctgtcatgggctgttaatcattaccgtgataacgccattacctacaaagcccagcgcgacaaaaatgccagagaactgaagctggcgaacgcggcaattactgacatgcagatgcgtcagcgtgatgttgctgcgctcgatgcaaaatacacgaaggagttagctgatgctaaagctgaaaatgatgctctgcgtgatgatgttgccgctggtcgtcgtcggttgcacatcaaagcagtctgtcagtcagtgcgtgaagccaccaccgcctccggcgtggataatgcagcctccccccgactggcagacaccgctgaacgggattatttcaccctcagagagaggctgatcactatgcaaaaacaactggaaggaacccagaagtatattaatgagcagtgcagatagagttgcccatatcgatgggcaactcatgcaattattgtgagcaatacacacgcgcttccagcggagtataaatgcctaaagtaataaaaccgagcaatccatttacgaatgtttgctgggtttctgttttaacaacattttctgcgccgccacaaattttggctgcatcgacagttttcttctgcccaattccagaaacgaagaaatgatgggtgatggtttcctttggtgctactgctgccggtttgttttgaacagtaaacgtctgttgagcacatcctgtaataagcagggccagcgcagtagcgagtagcatttttttcatggtgttattcccgatgctttttgaagttcgcagaatcgtatgtgtagaaaattaaacaaaccctaaacaatgagttgaaatttcatattgttaatatttattaatgtatgtcaggtgcgatgaatcgtcattgtattcccggattaactatgtccacagccctgacggggaacttctctgcgggagtgtccgggaataattaaaacgatgcacacagggtttagcgcgtacacgtattgcattatgccaacgccccggtgctgacacggaagaaaccggacgttatgatttagcgtggaaagatttgtgtagtgttctgaatgctctcagtaaatagtaatgaattatcaaaggtatagtaatatcttttatgttcatggatatttgtaacccatcggaaaactcctgctttagcaagattttccctgtattgctgaaatgtgatttctcttgatttcaacctatcataggacgtttctataagatgcgtgtttcttgagaatttaacatttacaacctttttaagtccttttattaacacggtgttatcgttttctaacacgatgtgaatattatctgtggctagatagtaaatataatgtgagacgttgtgacgtttgctagcctgtcagaccaagtttactcatatatactttagattgatttaaaacttcatttttaatttaaaaggatctaggtgaagatcctttttgataatctcatgaccaaaatcccttaacgtgagttttcgttccactgagcgtcagaccccgtagaaaagatcaaaggatcttcttgagatcctttttttctgcgcgtaatctgctgcttgcaaacaaaaaaaccaccgctaccagcggtggtttgtttgccggatcaagagctaccaactctttttccgaaggtaactggcttcagcagagcgcagataccaaatactgttcttctagtgtagccgtagttaggccaccacttcaagaactctgtagcaccgcctacatacctcgctctgctaatcctgttaccagtggctgctgccagtggcgataagtcgtgtcttaccgggttggactcaagacgatagttaccggataaggcgcagcggtcgggctgaacggggggttcgtgcacacagcccagcttggagcgaacgacctacaccgaactgagatacctacagcgtgagctatgagaaagcgccacgcttcccgaagggagaaaggcggacaggtatccggtaagcggcagggtcggaacaggagagcgcacgagggagcttccagggggaaacgcctggtatctttatagtcctgtcgggtttcgccacctctgacttgagcgtcgatttttgtgatgctcgtcaggggggcggagcctatggaaaaacgccagcaacgcggcctttttacggttcctggccttttgctggccttttgctcacatgttctttcctgcgttatcccctgattctgtggataaccgtattaccgcctttgagtgagctgataccgctcgccgcagccgaacgaccgagcgcagcgagtcagtgagcgaggaagcggaagagcgcccaatacgcaaaccgcctctccccgcgcgttggccgattcattaatgcagctggcacgacaggtttcccgactggaaagcgggcagtgagcgcaacgcaattaatgtgagttagctcactcattaggcaccccaggctttacactttatgcttccggctcgtatgttgtgtggaattgtgagcggataacaatttcacacaggaaacagctatgaccatgattacgccaagtttgcacgcctgccgttcgacgatttcgcgagttggttcagctgctgcctgaggctggacgacctcgcggagttctaccggcagtgcaaatccgtcggcatccaggaaaccagcagcggctatccgcgcatccatgcccccgaactgcaggagtggggaggcacgatggccgctttggtccggatctttgtgaaggaaccttacttctgtggtgtgacataattggacaaactacctacagagatttaaagctctaaggtaaatataaaatttttaagtgtataatgtgttaaactactgattctaattgtttgtgtattttagattccaacctatggaactgatgaatgggagcagtggtggaatgcctttaatgaggaaaacctgttttgctcagaagaaatgccatctagtgatgatgaggctactgctgactctcaacattctactcctccaaaaaagaagagaaaggtagaagaccccaaggactttccttcagaattgctaagttttttgagtcatgctgtgtttagtaatagaactcttgcttgctttgctatttacaccacaaaggaaaaagctgcactgctatacaagaaaattatggaaaaatattctgtaacctttataagtaggcataacagttataatcataacatactgttttttcttactccacacaggcatagagtgt

SEQ ID NO: 56 - DNA, 11432 bp, synthetic construct
  source 1..11432: mol_type = other DNA
ctgctattaataactatgctcaaaaattgtgtacctttagctttttaatttgtaaaggggttaataaggaatatttgatgtatagtgccttgactagagatcataatcagccataccacatttgtagaggttttacttgctttaaaaaacctcccacacctccccctgaacctgaaacataaaatgaatgcaattgttgttgttctagcttggccactccctctctgcgcgctcgctcgctcactgaggccgggcgaccaaaggtcgcccgacgcccgggctttgcccgggcggcctcagtgagcgagcgagcgcgcagagagggagtggccaactccatcactaggggttcctctcgaggagcttggcccattgcatacgttgtatccatatcataatatgtacatttatattggctcatgtccaacattaccgccatgttactagtgtcgacaggctcagaggcacacaggagtttctgggctcaccctgcccccttccaacccctcagttcccatcctccagcagctgtttgtgtgctgcctctgaagtccacactgaacaaacttcagcctactcatgtccctaaaatgggcaaacattgcaagcagcaaacagcaaacacacagccctccctgcctgctgaccttggagctggggcagaggtcagagacctctctgggcccatgccacctccaacatccactcgaccccttggaatttcggtggagaggagcagaggttgtcctggcgtggtttaggtagtgtgagaggggtcgacgatcttgctaccagtggaacagccactaaggattctgcagtgagagcagagggccagctaagtggtactctcccagagactgtctgactcacgccaccccctccaccttggacacaggacgctgtggtttctgagccaggtacaatgactcctttcggtaagtgcagtggaagctgtacactgcccaggcaaagcgtccgggcagcgtaggcgggcgactcagatcccagccagtggacttagcccctgtttgctcctccgataactggggtgaccttggttaatattcaccagcagcctcccccgttgcccctctggatccactgcttaaatacggacgaggacagggccctgtctcctcagcttcaggcaccaccactgacctgggacagtgaatcgtaagtatgcctttcactgcgagaggttctggagaggcttctgagctccccatggcccaggcaggcagcaggtctggggcaggaggggggttgtggagtgggtatccgcctgctgaggtgcagggcagatcatcatgtgccttgactcggggcctggcccccccatctctgtcttgcaggacaattgccgtcttctgtctcgtggggcatcctcctgctggcaggcctgtgctgcctggtccctgtctccctggctgaggaccgggtaccgccaccatgagcacagctgtgctggagaacccaggcttgggcagaaagctgtctgactttggccaggagaccagctacattgaggacaactgcaaccaaaatggtgccatctccctgatcttcagcctcaaggaggaagttggagccctggccaaagtgttaagactgtttgaagaaaatgatgtgaacctgacccacattgaaagcagacctagcagactgaagaaagatgagtatgagttcttcacccacctggataagagaagcctgcctgccctgaccaacatcatcaagatcctgagacatgacataggggccacagtgcatgagctgagcagagacaaaaaaaaagacacagtgccttggttccccaggacaatccaggagctggacagatttgccaaccagatcctgagctatggagctgagctggatgctgaccaccctggcttcaaggaccctgtctacagagccaggaggaagcagtttgctgatattgcctacaactacagacatggccaacccatccctagagttgagtacatggaggaagaaaaaaagacctggggcacagtgttcaagaccctgaagagcctgtacaagacccatgcctgctatgagtacaatcacatcttccccctgctggagaagtactgtggcttccatgaagacaacatccctcagctggaagatgtgagccagttcctgcagacctgcacaggcttcagactgagacctgtggcaggcctgctgagcagcagagacttcctgggaggcctggccttcagagtgttccactgtacccaatacatcagacatggcagcaagcccatgtacaccccagagcctgacatctgccatgagctgctgggccatgtgcccctgttctctgacaggagctttgcccagttcagccaggagataggccttgccagcctgggagcccctgatgaatacatagagaagttagccaccatctactggttcacagtggaatttggcctgtgcaagcagggagactccatcaaggcctatggagcaggcctgctgtcctcttttggagagctgcagtactgcctgtctgagaagcccaagctactgcctttagagctggaaaagacagccatccagaactacacagtcacagagttccagccactgtactatgtggctgaaagcttcaatgatgccaaggagaaggtgagaaactttgctgccaccatccccagacctttctctgtgagatatgacccttacacccagaggattgaagtgctggacaacacccagcagctgaaaatcctggctgacagcatcaactctgaaattggcatcctgtgttctgccctgcagaagatcaagtgaagatctgcctcgactgtgccttctagttgccagccatctgttgtttgcccctcccccgtgccttccttgaccctggaaggtgccactcccactgtcctttcctaataaaatgaggaaattgcatcgcattgtctgagtaggtgtcattctattctggggggtggggtggggcaggacagcaagggggaggattgggaagacaatagcaggcatgctggggatgcggtgggctctatggggcgcgccgtacccattgccaagttctgacaactgtctgtctatagccaattatgcatttcttaaattagaacccccccaatatacccaaatatatatatatgtgtgcatatatatagtaagttgtaacaaagttgtgaattcatacctgaagtatctcaagtgatgcaagttttatgaatttttgtttatgccttttgggaagagttgtattgacaaattttttatgcttaaagtaaaccataaatcaaaaaaataaaatctaggatgcaataaaacaaaacaacttcttgacataagtatggtatgtaaatctgttttgattggaaatcaatttgttatattgccagaattcctgttttagaatacatctctgctgatctgtctgtattcttagactgcatatctgggatgaactctgggcagaattcacatgggcttcctttgaaataaacaagacttttcaaattcttagtcgatctgcagaacctgtagccaggcactgaaccattttgatagatgcagtaatcgttgcaagtgtatatttcaaggagttctggctgggtcctagtttatgcttgtggcagaagcagtgagtaactgggaggaagttggtgagtaagcttcaaggaagaagtcatttttagtactctggatcttcctgattttaaagcactacaaaatggtgcattttcattcttgtcaagtgataacagatatattctgatgagcctgaaatgaatatatattgtatcatttttataatatctagcaaggtttgtattttcctagaacttgaactaaatttcagttcataaaatttataaaatacttagttgttgtaaaatatttttggaatgttcacataggtgacacacaaatgtcccattttcattctttctatagtaaatatgttctgatatgtgaaggtttagcagatgcatcagcatttaatcctagaggatctggcataatcttttcccccaagaatagaaattttttctgcttatgaaagtagtacatgtttctttaaaaacaaatcaatattgacttctgcctgctgtatagcactatgcctccacctggccatgaccaggggcatgtcctggtccacctacctgaaaatgtttgcaaccagcctcctggccatgtgcacaggggctgaagttgtcccacaggtattacgggccaacctgacaatacatgaagttccaccaaagtctgagaactcagaactgagctttggggactgaaagacagcacaaacctcaaatttctcagcactggaaacctcaaaatataactgaattccataaataagattttaagtcttaaatatgtatttttaaatgtattaaaagtcaagctgcttgtatttaagcacctaatacaatgcttaggttgtaaaaggagatgctcaataggtactaactgatatattgagatttaattatggtttgaccaatatttattggaaaccgccaaagcttaaatcatcagcttcttgaatgtgatttgaaaggtaatttagtattgaatagcatgtgagctagagtatttcattctttctggtttatttcttcaaatagactttgaatataatggtgaatgggtattataaattaactaataaaaatgacattgaaaatgaaaaaatatatatattaaagtgtagaaagtgaccaggcaccggtggatcccctaactacaaggaacccctagtgatggagttggccactccctctctgcgcgctcgctcgctcactgaggccgggcgaccaaaggtcgcccgacgcccgggctttgcccgggcggcctcagtgagcgagcgagcgcgcagagagggagtggccaacaggaagctcctctgtgtcctcataaaccctaacctcctctacttgagaggacattccaatcataggctgcccatccaccctctgtgtcctcctgttaattaggtcacttaacaaaaaggaaattgggtaggggtttttcacagaccgctttctaagggtaattttaaaatatctgggaagtcccttccactgctgtgttccagaagtgttggtaaacagcccacaaatgtcaacagcagaaacatacaagctgtcagctttgcacaagggcccaatctctggaagatccgcgcgtaccgagttctaattcactggccgtcgttttacaacgtcgtgactgggaaaaccctggcgttacccaacttaatcgccttgcagcacatccccctttcgccagctggcgtaatagcgaagaggcccgcaccgatcgcccttcccaacagttgcgcagcctgaatggcgaatggcgcctgatgcggtattttctccttacgcatctgtgcggtatttcacaccgcatatggtgcactctcagtacaatctgctctgatgccgcatagttaagccagccccgacacccgccaacacccgctgacgcgccctgacgggcttgtctgctcccggcatccgcttacagacaagctgtgaccgtctccgggagctgcatgtgtcagaggttttcaccgtcatcaccgaaacgcgcgagacgaaagggcctcgtgatacgcctatttttataggttaatgtcatgataataatggtttcttagacgtcaggtggcacttttcggggaaatgtgcgcggaacccccatttgtttatttttctaaatacattcaaatatgtatccgctcatgagacaataaccctgataaatgcttcaataatattgaaaaaggaagagtatgagccatattcaacgggaaacgtcttgctctaggccgcgattaaattccaacatggatgctgatttatatgggtataaatgggctcgcgataatgtcgggcaatcaggtgcgacaatctatcgattgtatgggaagcccgatgcgccagagttgtttctgaaacatggcaaaggtagcgttgccaatgatgttacagatgagatggtcagactaaactggctgacggaatttatgcctcttccgaccatcaagcattttatccgtactcctgatgatgcatggttactcaccactgcgatccctgggaaaacagcattccaggtattagaagaatatcctgattcaggtgaaaatattgttgatgcgctggcagtgttcctgcgccggttgcattcgattcctgtttgtaattgtccttttaacagcgatcgcgtatttcgtctcgctcaggcgcaatcacgaatgaataacggtttggttgatgcgagtgattttgatgacgagcgtaatggctggcctgttgaacaagtctggaaagaaatgcataaacttttgccattctcaccggattcagtcgtcactcatggtgatttctcacttgataaccttatttttgacgaggggaaattaataggttgtattgatgttggacgagtcggaatcgcagaccgataccaggatcttgccatcctatggaactgcctcggtgagttttctccttcattacagaaacggctttttcaaaaatatggtattgataatcctgatatgaataaattgcagtttcatttgatgctcgatgagtttttctaaaagcttgtgcaatgccacaaagaagagtcaatcgcagacaacattttgaatgcggtcacacgttagcagcatgattgccacggatggcaacatattaacggcatgatattgacttattgaataaaattgggtaaatttgactcaacgatgggttaattcgctcgttgtggtagtgagatgaaaagaggcggcgcttactaccgattccgcctagttggtcacttcgacgtatcgtctggaactccaaccatcgcaggcagagaggtctgcaaaatgcaatcccgaaacagttcgcaggtaatagttagagcctgcataacggtttcgggattttttatatctgcacaacaggtaagagcattgagtcgataatcgtgaagagtcggcgagcctggttagccagtgctctttccgttgtgctgaattaagcgaataccggaagcagaaccggatcaccaaatgcgtacaggcgtcatcgccgcccagcaacagcacaacccaaactgagccgtagccactgtctgtcctgaattcattagtaatagttacgctgcggccttttacacatgaccttcgtgaaagcgggtggcaggaggtcgcgctaacaacctcctgccgttttgcccgtgcatatcggtcacgaacaaatctgattactaaacacagtagcctggatttgttctatcagtaatcgaccttattcctaattaaatagagcaaatccccttattgggggtaagacatgaagatgccagaaaaacatgacctgttggccgccattctcgcggcaaaggaacaaggcatcggggcaatccttgcgtttgcaatggcgtaccttcgcggcagatataatggcggtgcgtttacaaaaacagtaatcgacgcaacgatgtgcgccattatcgcctggttcattcgtgaccttctcgacttcgccggactaagtagcaatctcgcttatataacgagcgtgtttatcggctacatcggtactgactcgattggttcgcttatcaaacgcttcgctgctaaaaaagccggagtagaagatggtagaaatcaataatcaacgtaaggcgttcctcgatatgctggcgtggtcggagggaactgataacggacgtcagaaaaccagaaatcatggttatgacgtcattgtaggcggagagctatttactgattactccgatcaccctcgcaaacttgtcacgctaaacccaaaactcaaatcaacaggcgccggacgctaccagcttctttcccgttggtgggatgcctaccgcaagcagcttggcctgaaagacttctctccgaaaagtcaggacgctgtggcattgcagcagattaaggagcgtggcgctttacctatgattgatcgtggtgatatccgtcaggcaatcgaccgttgcagcaatatctgggcttcactgccgggcgctggttatggtcagttcgagcataaggctgacagcctgattgcaaaattcaaagaagcgggcggaacggtcagagagattgatgtatgagcagagtcaccgcgattatctccgctctggttatctgcatcatcgtctgcctgtcatgggctgttaatcattaccgtgataacgccattacctacaaagcccagcgcgacaaaaatgccagagaactgaagctggcgaacgcggcaattactgacatgcagatgcgtcagcgtgatgttgctgcgctcgatgcaaaatacacgaaggagttagctgatgctaaagctgaaaatgatgctctgcgtgatgatgttgccgctggtcgtcgtcggttgcacatcaaagcagtctgtcagtcagtgcgtgaagccaccaccgcctccggcgtggataatgcagcctccccccgactggcagacaccgctgaacgggattatttcaccctcagagagaggctgatcactatgcaaaaacaactggaaggaacccagaagtatattaatgagcagtgcagatagagttgcccatatcgatgggcaactcatgcaattattgtgagcaatacacacgcgcttccagcggagtataaatgcctaaagtaataaaaccgagcaatccatttacgaatgtttgctgggtttctgttttaacaacattttctgcgccgccacaaattttggctgcatcgacagttttcttctgcccaattccagaaacgaagaaatgatgggtgatggtttcctttggtgctactgctgccggtttgttttgaacagtaaacgtctgttgagcacatcctgtaataagcagggccagcgcagtagcgagtagcatttttttcatggtgttattcccgatgctttttgaagttcgcagaatcgtatgtgtagaaaattaaacaaaccctaaacaatgagttgaaatttcatattgttaatatttattaatgtatgtcaggtgcgatgaatcgtcattgtattcccggattaactatgtccacagccctgacggggaacttctctgcgggagtgtccgggaataattaaaacgatgcacacagggtttagcgcgtacacgtattgcattatgccaacgccccggtgctgacacggaagaaaccggacgttatgatttagcgtggaaagatttgtgtagtgttctgaatgctctcagtaaatagtaatgaattatcaaaggtatagtaatatcttttatgttcatggatatttgtaacccatcggaaaactcctgctttagcaagattttccctgtattgctgaaatgtgatttctcttgatttcaacctatcataggacgtttctataagatgcgtgtttcttgagaatttaacatttacaacctttttaagtccttttattaacacggtgttatcgttttctaacacgatgtgaatattatctgtggctagatagtaaatataatgtgagacgttgtgacgtttgctagcctgtcagaccaagtttactcatatatactttagattgatttaaaacttcatttttaatttaaaaggatctaggtgaagatcctttttgataatctcatgaccaaaatcccttaacgtgagttttcgttccactgagcgtcagaccccgtagaaaagatcaaaggatcttcttgagatcctttttttctgcgcgtaatctgctgcttgcaaacaaaaaaaccaccgctaccagcggtggtttgtttgccggatcaagagctaccaactctttttccgaaggtaactggcttcagcagagcgcagataccaaatactgttcttctagtgtagccgtagttaggccaccacttcaagaactctgtagcaccgcctacatacctcgctctgctaatcctgttaccagtggctgctgccagtggcgataagtcgtgtcttaccgggttggactcaagacgatagttaccggataaggcgcagcggtcgggctgaacggggggttcgtgcacacagcccagcttggagcgaacgacctacaccgaactgagatacctacagcgtgagctatgagaaagcgccacgcttcccgaagggagaaaggcggacaggtatccggtaagcggcagggtcggaacaggagagcgcacgagggagcttccagggggaaacgcctggtatctttatagtcctgtcgggtttcgccacctctgacttgagcgtcgatttttgtgatgctcgtcaggggggcggagcctatggaaaaacgccagcaacgcggcctttttacggttcctggccttttgctggccttttgctcacatgttctttcctgcgttatcccctgattctgtggataaccgtattaccgcctttgagtgagctgataccgctcgccgcagccgaacgaccgagcgcagcgagtcagtgagcgaggaagcggaagagcgcccaatacgcaaaccgcctctccccgcgcgttggccgattcattaatgcagctggcacgacaggtttcccgactggaaagcgggcagtgagcgcaacgcaattaatgtgagttagctcactcattaggcaccccaggctttacactttatgcttccggctcgtatgttgtgtggaattgtgagcggataacaatttcacacaggaaacagctatgaccatgattacgccaagtttgcacgcctgccgttcgacgatttcgcgagttggttcagctgctgcctgaggctggacgacctcgcggagttctaccggcagtgcaaatccgtcggcatccaggaaaccagcagcggctatccgcgcatccatgcccccgaactgcaggagtggggaggcacgatggccgctttggtccggatctttgtgaaggaaccttacttctgtggtgtgacataattggacaaactacctacagagatttaaagctctaaggtaaatataaaatttttaagtgtataatgtgttaaactactgattctaattgtttgtgtattttagattccaacctatggaactgatgaatgggagcagtggtggaatgcctttaatgaggaaaacctgttttgctcagaagaaatgccatctagtgatgatgaggctactgctgactctcaacattctactcctccaaaaaagaagagaaaggtagaagaccccaaggactttccttcagaattgctaagttttttgagtcatgctgtgtttagtaatagaactcttgcttgctttgctatttacaccacaaaggaaaaagctgcactgctatacaagaaaattatggaaaaatattctgtaacctttataagtaggcataacagttataatcataacatactgttttttcttactccacacaggcatagagtgt

SEQ ID NO: 57 - DNA, 11432 bp, synthetic construct
  source 1..11432: mol_type = other DNA
ctgctattaataactatgctcaaaaattgtgtacctttagctttttaatttgtaaaggggttaataaggaatatttgatgtatagtgccttgactagagatcataatcagccataccacatttgtagaggttttacttgctttaaaaaacctcccacacctccccctgaacctgaaacataaaatgaatgcaattgttgttgttctagcttggccactccctctctgcgcgctcgctcgctcactgaggccgggcgaccaaaggtcgcccgacgcccgggctttgcccgggcggcctcagtgagcgagcgagcgcgcagagagggagtggccaactccatcactaggggttcctctcgaggagcttggcccattgcatacgttgtatccatatcataatatgtacatttatattggctcatgtccaacattaccgccatgttactagtgtcgacaggctcagaggcacacaggagtttctgggctcaccctgcccccttccaacccctcagttcccatcctccagcagctgtttgtgtgctgcctctgaagtccacactgaacaaacttcagcctactcatgtccctaaaatgggcaaacattgcaagcagcaaacagcaaacacacagccctccctgcctgctgaccttggagctggggcagaggtcagagacctctctgggcccatgccacctccaacatccactcgaccccttggaatttcggtggagaggagcagaggttgtcctggcgtggtttaggtagtgtgagaggggtcgacgatcttgctaccagtggaacagccactaaggattctgcagtgagagcagagggccagctaagtggtactctcccagagactgtctgactcacgccaccccctccaccttggacacaggacgctgtggtttctgagccaggtacaatgactcctttcggtaagtgcagtggaagctgtacactgcccaggcaaagcgtccgggcagcgtaggcgggcgactcagatcccagccagtggacttagcccctgtttgctcctccgataactggggtgaccttggttaatattcaccagcagcctcccccgttgcccctctggatccactgcttaaatacggacgaggacagggccctgtctcctcagcttcaggcaccaccactgacctgggacagtgaatcgtaagtatgcctttcactgcgagaggttctggagaggcttctgagctccccatggcccaggcaggcagcaggtctggggcaggaggggggttgtggagtgggtatccgcctgctgaggtgcagggcagatcatcatgtgccttgactcggggcctggcccccccatctctgtcttgcaggacaattgccgtcttctgtctcgtggggcatcctcctgctggcaggcctgtgctgcctggtccctgtctccctggctgaggaccgggtaccgccaccatgagcacagctgtgctggaaaaccctggcttaggcagaaagctgtctgactttggccaagagaccagctacattgaggataactgcaaccagaatggagccatctctctgatcttcagcttgaaggaggaagtgggagccctagccaaggtgctgagactgtttgaggagaatgatgtgaatctgacccacattgaaagcagacctagcagactgaagaaggatgaatatgaattcttcacccacctggacaaaagaagcctaccagccctgaccaacatcatcaagatcctgaggcatgacataggagccacagtgcatgagctgtccagggacaaaaaaaaggacacagtgccttggttccccagaacaatccaggagctggacagatttgccaaccaaatcctcagctatggagctgaactggatgctgaccaccctggcttcaaggacccagtgtacagggccagaagaaagcagtttgctgacatagcctacaactacaggcatggccaacctatccctagggtggagtacatggaggaagaaaagaagacctggggcacagtgttcaagaccctgaaaagcctgtacaagacccatgcctgctatgaatacaaccacatcttccctctgctggagaagtactgtggcttccatgaagacaacatccctcagctggaggatgtgagccagttcctgcagacctgcacaggcttcagactgaggccagtggctggcctgctgagcagcagagacttcctggggggcctggccttcagagtgttccactgcacccagtacatcagacacggcagcaagcctatgtacacccctgaacctgacatctgccatgagctcctgggccatgtgcccctgttctctgatagatcctttgcccagttcagccaggaaattggcctggccagcctgggtgcccctgatgaatacattgaaaagctggcaaccatctactggttcacagttgagtttggcctgtgtaaacagggagacagcatcaaggcctatggagcaggcctgctgtccagctttggagagctgcagtactgtctgagtgagaaacctaagctgctgcccctggagctggagaagacagccatccagaactacacagtgactgagttccagcccctgtactatgttgctgagagcttcaatgatgccaaggagaaggtgagaaactttgcagccaccatccccagacccttctcagtcagatatgacccttacacccagagaattgaggtgcttgacaacacccagcagctgaagatcctggctgactctatcaactctgaaattggcatcctctgctctgccttgcagaaaatcaagtgaagatctgcctcgactgtgccttctagttgccagccatctgttgtttgcccctcccccgtgccttccttgaccctggaaggtgccactcccactgtcctttcctaataaaatgaggaaattgcatcgcattgtctgagtaggtgtcattctattctggggggtggggtggggcaggacagcaagggggaggattgggaagacaatagcaggcatgctggggatgcggtgggctctatggggcgcgccgtacccattgccaagttctgacaactgtctgtctatagccaattatgcatttcttaaattagaacccccccaatatacccaaatatatatatatgtgtgcatatatatagtaagttgtaacaaagttgtgaattcatacctgaagtatctcaagtgatgcaagttttatgaatttttgtttatgccttttgggaagagttgtattgacaaattttttatgcttaaagtaaaccataaatcaaaaaaataaaatctaggatgcaataaaacaaaacaacttcttgacataagtatggtatgtaaatctgttttgattggaaatcaatttgttatattgccagaattcctgttttagaatacatctctgctgatctgtctgtattcttagactgcatatctgggatgaactctgggcagaattcacatgggcttcctttgaaataaacaagacttttcaaattcttagtcgatctgcagaacctgtagccaggcactgaaccattttgatagatgcagtaatcgttgcaagtgtatatttcaaggagttctggctgggtcctagtttatgcttgtggcagaagcagtgagtaactgggaggaagttggtgagtaagcttcaaggaagaagtcatttttagtactctggatcttcctgattttaaagcactacaaaatggtgcattttcattcttgtcaagtgataacagatatattctgatgagcctgaaatgaatatatattgtatcatttttataatatctagcaaggtttgtattttcctagaacttgaactaaatttcagttcataaaatttataaaatacttagttgttgtaaaatatttttggaatgttcacataggtgacacacaaatgtcccattttcattctttctatagtaaatatgttctgatatgtgaaggtttagcagatgcatcagcatttaatcctagaggatctggcataatcttttcccccaagaatagaaattttttctgcttatgaaagtagtacatgtttctttaaaaacaaatcaatattgacttctgcctgctgtatagcactatgcctccacctggccatgaccaggggcatgtcctggtccacctacctgaaaatgtttgcaaccagcctcctggccatgtgcacaggggctgaagttgtcccacaggtattacgggccaacctgacaatacatgaagttccaccaaagtctgagaactcagaactgagctttggggactgaaagacagcacaaacctcaaatttctcagcactggaaacctcaaaatataactgaattccataaataagattttaagtcttaaatatgtatttttaaatgtattaaaagtcaagctgcttgtatttaagcacctaatacaatgcttaggttgtaaaaggagatgctcaataggtactaactgatatattgagatttaattatggtttgaccaatatttattggaaaccgccaaagcttaaatcatcagcttcttgaatgtgatttgaaaggtaatttagtattgaatagcatgtgagctagagtatttcattctttctggtttatttcttcaaatagactttgaatataatggtgaatgggtattataaattaactaataaaaatgacattgaaaatgaaaaaatatatatattaaagtgtagaaagtgaccaggcaccggtggatcccctaactacaaggaacccctagtgatggagttggccactccctctctgcgcgctcgctcgctcactgaggccgggcgaccaaaggtcgcccgacgcccgggctttgcccgggcggcctcagtgagcgagcgagcgcgcagagagggagtggccaacaggaagctcctctgtgtcctcataaaccctaacctcctctacttgagaggacattccaatcataggctgcccatccaccctctgtgtcctcctgttaattaggtcacttaacaaaaaggaaattgggtaggggtttttcacagaccgctttctaagggtaattttaaaatatctgggaagtcccttccactgctgtgttccagaagtgttggtaaacagcccacaaatgtcaacagcagaaacatacaagctgtcagctttgcacaagggcccaatctctggaagatccgcgcgtaccgagttctaattcactggccgtcgttttacaacgtcgtgactgggaaaaccctggcgttacccaacttaatcgccttgcagcacatccccctttcgccagctggcgtaatagcgaagaggcccgcaccgatcgcccttcccaacagttgcgcagcctgaatggcgaatggcgcctgatgcggtattttctccttacgcatctgtgcggtatttcacaccgcatatggtgcactctcagtacaatctgctctgatgccgcatagttaagccagccccgacacccgccaacacccgctgacgcgccctgacgggcttgtctgctcccggcatccgcttacagacaagctgtgaccgtctccgggagctgcatgtgtcagaggttttcaccgtcatcaccgaaacgcgcgagacgaaagggcctcgtgatacgcctatttttataggttaatgtcatgataataatggtttcttagacgtcaggtggcacttttcggggaaatgtgcgcggaacccccatttgtttatttttctaaatacattcaaatatgtatccgctcatgagacaataaccctgataaatgcttcaataatattgaaaaaggaagagtatgagccatattcaacgggaaacgtcttgctctaggccgcgattaaattccaacatggatgctgatttatatgggtataaatgggctcgcgataatgtcgggcaatcaggtgcgacaatctatcgattgtatgggaagcccgatgcgccagagttgtttctgaaacatggcaaaggtagcgttgccaatgatgttacagatgagatggtcagactaaactggctgacggaatttatgcctcttccgaccatcaagcattttatccgtactcctgatgatgcatggttactcaccactgcgatccctgggaaaacagcattccaggtattagaagaatatcctgattcaggtgaaaatattgttgatgcgctggcagtgttcctgcgccggttgcattcgattcctgtttgtaattgtccttttaacagcgatcgcgtatttcgtctcgctcaggcgcaatcacgaatgaataacggtttggttgatgcgagtgattttgatgacgagcgtaatggctggcctgttgaacaagtctggaaagaaatgcataaacttttgccattctcaccggattcagtcgtcactcatggtgatttctcacttgataaccttatttttgacgaggggaaattaataggttgtattgatgttggacgagtcggaatcgcagaccgataccaggatcttgccatcctatggaactgcctcggtgagttttctccttcattacagaaacggctttttcaaaaatatggtattgataatcctgatatgaataaattgcagtttcatttgatgctcgatgagtttttctaaaagcttgtgcaatgccacaaagaagagtcaatcgcagacaacattttgaatgcggtcacacgttagcagcatgattgccacggatggcaacatattaacggcatgatattgacttattgaataaaattgggtaaatttgactcaacgatgggttaattcgctcgttgtggtagtgagatgaaaagaggcggcgcttactaccgattccgcctagttggtcacttcgacgtatcgtctggaactccaaccatcgcaggcagagaggtctgcaaaatgcaatcccgaaacagttcgcaggtaatagttagagcctgcataacggtttcgggattttttatatctgcacaacaggtaagagcattgagtcgataatcgtgaagagtcggcgagcctggttagccagtgctctttccgttgtgctgaattaagcgaataccggaagcagaaccggatcaccaaatgcgtacaggcgtcatcgccgcccagcaacagcacaacccaaactgagccgtagccactgtctgtcctgaattcattagtaatagttacgctgcggccttttacacatgaccttcgtgaaagcgggtggcaggaggtcgcgctaacaacctcctgccgttttgcccgtgcatatcggtcacgaacaaatctgattactaaacacagtagcctggatttgttctatcagtaatcgaccttattcctaattaaatagagcaaatccccttattgggggtaagacatgaagatgccagaaaaacatgacctgttggccgccattctcgcggcaaaggaacaaggcatcggggcaatccttgcgtttgcaatggcgtaccttcgcggcagatataatggcggtgcgtttacaaaaacagtaatcgacgcaacgatgtgcgccattatcgcctggttcattcgtgaccttctcgacttcgccggactaagtagcaatctcgcttatataacgagcgtgtttatcggctacatcggtactgactcgattggttcgcttatcaaacgcttcgctgctaaaaaagccggagtagaagatggtagaaatcaataatcaacgtaaggcgttcctcgatatgctggcgtggtcggagggaactgataacggacgtcagaaaaccagaaatcatggttatgacgtcattgtaggcggagagctatttactgattactccgatcaccctcgcaaacttgtcacgctaaacccaaaactcaaatcaacaggcgccggacgctaccagcttctttcccgttggtgggatgcctaccgcaagcagcttggcctgaaagacttctctccgaaaagtcaggacgctgtggcattgcagcagattaaggagcgtggcgctttacctatgattgatcgtggtgatatccgtcaggcaatcgaccgttgcagcaatatctgggcttcactgccgggcgctggttatggtcagttcgagcataaggctgacagcctgattgcaaaattcaaagaagcgggcggaacggtcagagagattgatgtatgagcagagtcaccgcgattatctccgctctggttatctgcatcatcgtctgcctgtcatgggctgttaatcattaccgtgataacgccattacctacaaagcccagcgcgacaaaaatgccagagaactgaagctggcgaacgcggcaattactgacatgcagatgcgtcagcgtgatgttgctgcgctcgatgcaaaatacacgaaggagttagctgatgctaaagctgaaaatgatgctctgcgtgatgatgttgccgctggtcgtcgtcggttgcacatcaaagcagtctgtcagtcagtgcgtgaagccaccaccgcctccggcgtggataatgcagcctccccccgactggcagacaccgctgaacgggattatttcaccctcagagagaggctgatcactatgcaaaaacaactggaaggaacccagaagtatattaatgagcagtgcagatagagttgcccatatcgatgggcaactcatgcaattattgtgagcaatacacacgcgcttccagcggagtataaatgcctaaagtaataaaaccgagcaatccatttacgaatgtttgctgggtttctgttttaacaacattttctgcgccgccacaaattttggctgcatcgacagttttcttctgcccaattccagaaacgaagaaatgatgggtgatggtttcctttggtgctactgctgccggtttgttttgaacagtaaacgtctgttgagcacatcctgtaataagcagggccagcgcagtagcgagtagcatttttttcatggtgttattcccgatgctttttgaagttcgcagaatcgtatgtgtagaaaattaaacaaaccctaaacaatgagttgaaatttcatattgttaatatttattaatgtatgtcaggtgcgatgaatcgtcattgtattcccggattaactatgtccacagccctgacggggaacttctctgcgggagtgtccgggaataattaaaacgatgcacacagggtttagcgcgtacacgtattgcattatgccaacgccccggtgctgacacggaagaaaccggacgttatgatttagcgtggaaagatttgtgtagtgttctgaatgctctcagtaaatagtaatgaattatcaaaggtatagtaatatcttttatgttcatggatatttgtaacccatcggaaaactcctgctttagcaagattttccctgtattgctgaaatgtgatttctcttgatttcaacctatcataggacgtttctataagatgcgtgtttcttgagaatttaacatttacaacctttttaagtccttttattaacacggtgttatcgttttctaacacgatgtgaatattatctgtggctagatagtaaatataatgtgagacgttgtgacgtttgctagcctgtcagaccaagtttactcatatatactttagattgatttaaaacttcatttttaatttaaaaggatctaggtgaagatcctttttgataatctcatgaccaaaatcccttaacgtgagttttcgttccactgagcgtcagaccccgtagaaaagatcaaaggatcttcttgagatcctttttttctgcgcgtaatctgctgcttgcaaacaaaaaaaccaccgctaccagcggtggtttgtttgccggatcaagagctaccaactctttttccgaaggtaactggcttcagcagagcgcagataccaaatactgttcttctagtgtagccgtagttaggccaccacttcaagaactctgtagcaccgcctacatacctcgctctgctaatcctgttaccagtggctgctgccagtggcgataagtcgtgtcttaccgggttggactcaagacgatagttaccggataaggcgcagcggtcgggctgaacggggggttcgtgcacacagcccagcttggagcgaacgacctacaccgaactgagatacctacagcgtgagctatgagaaagcgccacgcttcccgaagggagaaaggcggacaggtatccggtaagcggcagggtcggaacaggagagcgcacgagggagcttccagggggaaacgcctggtatctttatagtcctgtcgggtttcgccacctctgacttgagcgtcgatttttgtgatgctcgtcaggggggcggagcctatggaaaaacgccagcaacgcggcctttttacggttcctggccttttgctggccttttgctcacatgttctttcctgcgttatcccctgattctgtggataaccgtattaccgcctttgagtgagctgataccgctcgccgcagccgaacgaccgagcgcagcgagtcagtgagcgaggaagcggaagagcgcccaatacgcaaaccgcctctccccgcgcgttggccgattcattaatgcagctggcacgacaggtttcccgactggaaagcgggcagtgagcgcaacgcaattaatgtgagttagctcactcattaggcaccccaggctttacactttatgcttccggctcgtatgttgtgtggaattgtgagcggataacaatttcacacaggaaacagctatgaccatgattacgccaagtttgcacgcctgccgttcgacgatttcgcgagttggttcagctgctgcctgaggctggacgacctcgcggagttctaccggcagtgcaaatccgtcggcatccaggaaaccagcagcggctatccgcgcatccatgcccccgaactgcaggagtggggaggcacgatggccgctttggtccggatctttgtgaaggaaccttacttctgtggtgtgacataattggacaaactacctacagagatttaaagctctaaggtaaatataaaatttttaagtgtataatgtgttaaactactgattctaattgtttgtgtattttagattccaacctatggaactgatgaatgggagcagtggtggaatgcctttaatgaggaaaacctgttttgctcagaagaaatgccatctagtgatgatgaggctactgctgactctcaacattctactcctccaaaaaagaagagaaaggtagaagaccccaaggactttccttcagaattgctaagttttttgagtcatgctgtgtttagtaatagaactcttgcttgctttgctatttacaccacaaaggaaaaagctgcactgctatacaagaaaattatggaaaaatattctgtaacctttataagtaggcataacagttataatcataacatactgttttttcttactccacacaggcatagagtgt

SEQ ID NO: 58 - DNA, 11432 bp, synthetic construct
  source 1..11432: mol_type = other DNA
ctgctattaataactatgctcaaaaattgtgtacctttagctttttaatttgtaaaggggttaataaggaatatttgatgtatagtgccttgactagagatcataatcagccataccacatttgtagaggttttacttgctttaaaaaacctcccacacctccccctgaacctgaaacataaaatgaatgcaattgttgttgttctagcttggccactccctctctgcgcgctcgctcgctcactgaggccgggcgaccaaaggtcgcccgacgcccgggctttgcccgggcggcctcagtgagcgagcgagcgcgcagagagggagtggccaactccatcactaggggttcctctcgaggagcttggcccattgcatacgttgtatccatatcataatatgtacatttatattggctcatgtccaacattaccgccatgttactagtgtcgacaggctcagaggcacacaggagtttctgggctcaccctgcccccttccaacccctcagttcccatcctccagcagctgtttgtgtgctgcctctgaagtccacactgaacaaacttcagcctactcatgtccctaaaatgggcaaacattgcaagcagcaaacagcaaacacacagccctccctgcctgctgaccttggagctggggcagaggtcagagacctctctgggcccatgccacctccaacatccactcgaccccttggaatttcggtggagaggagcagaggttgtcctggcgtggtttaggtagtgtgagaggggtcgacgatcttgctaccagtggaacagccactaaggattctgcagtgagagcagagggccagctaagtggtactctcccagagactgtctgactcacgccaccccctccaccttggacacaggacgctgtggtttctgagccaggtacaatgactcctttcggtaagtgcagtggaagctgtacactgcccaggcaaagcgtccgggcagcgtaggcgggcgactcagatcccagccagtggacttagcccctgtttgctcctccgataactggggtgaccttggttaatattcaccagcagcctcccccgttgcccctctggatccactgcttaaatacggacgaggacagggccctgtctcctcagcttcaggcaccaccactgacctgggacagtgaatcgtaagtatgcctttcactgcgagaggttctggagaggcttctgagctccccatggcccaggcaggcagcaggtctggggcaggaggggggttgtggagtgggtatccgcctgctgaggtgcagggcagatcatcatgtgccttgactcggggcctggcccccccatctctgtcttgcaggacaattgccgtcttctgtctcgtggggcatcctcctgctggcaggcctgtgctgcctggtccctgtctccctggctgaggaccgggtaccgccaccatgagcacagcagtgctggagaaccctggcctgggcaggaaattgtctgactttggccaggaaacctcctacattgaggacaactgtaaccagaatggagccatcagcctgatcttcagcctgaaagaggaggtgggggccctggccaaggtgctgagactgtttgaggaaaatgatgtcaacctgacccacattgagtccagacccagcagactgaagaaagatgaatatgagttcttcacacacctggacaagagaagcctgcctgccctgaccaacatcatcaagatcctgagacatgacataggagccacagtgcatgagctgagcagggacaagaagaaggacacagtgccctggttcccaagaaccatccaggaactggatagatttgccaaccagatcctgagctatggagctgagctggatgctgaccacccaggcttcaaggaccctgtgtacagagccagaaggaagcagtttgctgacatagcctacaactacagacacggccagcctatccccagagtggaatacatggaagaggagaagaagacctggggcactgtgttcaagacccttaagtctctgtacaagacccatgcctgctatgaatacaaccacatcttccctctgctggagaagtactgtggcttccatgaagacaatatcccccagctggaggatgtgagccagttcctgcaaacctgcactggcttcagactgagacctgtggcaggcctgctgagcagcagagacttcctgggtggcctggccttcagagtcttccactgtacccagtacatcaggcatggcagcaagcccatgtacactccagagcctgacatctgccacgagctgctgggccatgtgcctctgttctcagacagaagctttgcccagttcagccaggagattggcttagcctccttaggagcccctgatgaatacatagaaaaactggccaccatctactggttcacagtggagtttggcctgtgcaagcaaggtgacagcatcaaagcctatggagctggcctgctgagctcctttggagaacttcagtactgcctctctgagaagcctaaactgctgcctctggagctggagaagacagccatccagaactacacagtgacagaattccaacctctgtactatgttgctgagagcttcaatgatgccaaagagaaggtgagaaactttgctgccaccatccccagacccttctctgtgaggtatgacccttacacccagagaattgaagtgctggacaacacccagcagctgaagatcctggctgacagcatcaactctgagataggcatcctgtgctctgccctgcaaaagatcaagtgaagatctgcctcgactgtgccttctagttgccagccatctgttgtttgcccctcccccgtgccttccttgaccctggaaggtgccactcccactgtcctttcctaataaaatgaggaaattgcatcgcattgtctgagtaggtgtcattctattctggggggtggggtggggcaggacagcaagggggaggattgggaagacaatagcaggcatgctggggatgcggtgggctctatggggcgcgccgtacccattgccaagttctgacaactgtctgtctatagccaattatgcatttcttaaattagaacccccccaatatacccaaatatatatatatgtgtgcatatatatagtaagttgtaacaaagttgtgaattcatacctgaagtatctcaagtgatgcaagttttatgaatttttgtttatgccttttgggaagagttgtattgacaaattttttatgcttaaagtaaaccataaatcaaaaaaataaaatctaggatgcaataaaacaaaacaacttcttgacataagtatggtatgtaaatctgttttgattggaaatcaatttgttatattgccagaattcctgttttagaatacatctctgctgatctgtctgtattcttagactgcatatctgggatgaactctgggcagaattcacatgggcttcctttgaaataaacaagacttttcaaattcttagtcgatctgcagaacctgtagccaggcactgaaccattttgatagatgcagtaatcgttgcaagtgtatatttcaaggagttctggctgggtcctagtttatgcttgtggcagaagcagtgagtaactgggaggaagttggtgagtaagcttcaaggaagaagtcatttttagtactctggatcttcctgattttaaagcactacaaaatggtgcattttcattcttgtcaagtgataacagatatattctgatgagcctgaaatgaatatatattgtatcatttttataatatctagcaaggtttgtattttcctagaacttgaactaaatttcagttcataaaatttataaaatacttagttgttgtaaaatatttttggaatgttcacataggtgacacacaaatgtcccattttcattctttctatagtaaatatgttctgatatgtgaaggtttagcagatgcatcagcatttaatcctagaggatctggcataatcttttcccccaagaatagaaattttttctgcttatgaaagtagtacatgtttctttaaaaacaaatcaatattgacttctgcctgctgtatagcactatgcctccacctggccatgaccaggggcatgtcctggtccacctacctgaaaatgtttgcaaccagcctcctggccatgtgcacaggggctgaagttgtcccacaggtattacgggccaacctgacaatacatgaagttccaccaaagtctgagaactcagaactgagctttggggactgaaagacagcacaaacctcaaatttctcagcactggaaacctcaaaatataactgaattccataaataagattttaagtcttaaatatgtatttttaaatgtattaaaagtcaagctgcttgtatttaagcacctaatacaatgcttaggttgtaaaaggagatgctcaataggtactaactgatatattgagatttaattatggtttgaccaatatttattggaaaccgccaaagcttaaatcatcagcttcttgaatgtgatttgaaaggtaatttagtattgaatagcatgtgagctagagtatttcattctttctggtttatttcttcaaatagactttgaatataatggtgaatgggtattataaattaactaataaaaatgacattgaaaatgaaaaaatatatatattaaagtgtagaaagtgaccaggcaccggtggatcccctaactacaaggaacccctagtgatggagttggccactccctctctgcgcgctcgctcgctcactgaggccgggcgaccaaaggtcgcccgacgcccgggctttgcccgggcggcctcagtgagcgagcgagcgcgcagagagggagtggccaacaggaagctcctctgtgtcctcataaaccctaacctcctctacttgagaggacattccaatcataggctgcccatccaccctctgtgtcctcctgttaattaggtcacttaacaaaaaggaaattgggtaggggtttttcacagaccgctttctaagggtaattttaaaatatctgggaagtcccttccactgctgtgttccagaagtgttggtaaacagcccacaaatgtcaacagcagaaacatacaagctgtcagctttgcacaagggcccaatctctggaagatccgcgcgtaccgagttctaattcactggccgtcgttttacaacgtcgtgactgggaaaaccctggcgttacccaacttaatcgccttgcagcacatccccctttcgccagctggcgtaatagcgaagaggcccgcaccgatcgcccttcccaacagttgcgcagcctgaatggcgaatggcgcctgatgcggtattttctccttacgcatctgtgcggtatttcacaccgcatatggtgcactctcagtacaatctgctctgatgccgcatagttaagccagccccgacacccgccaacacccgctgacgcgccctgacgggcttgtctgctcccggcatccgcttacagacaagctgtgaccgtctccgggagctgcatgtgtcagaggttttcaccgtcatcaccgaaacgcgcgagacgaaagggcctcgtgatacgcctatttttataggttaatgtcatgataataatggtttcttagacgtcaggtggcacttttcggggaaatgtgcgcggaacccccatttgtttatttttctaaatacattcaaatatgtatccgctcatgagacaataaccctgataaatgcttcaataatattgaaaaaggaagagtatgagccatattcaacgggaaacgtcttgctctaggccgcgattaaattccaacatggatgctgatttatatgggtataaatgggctcgcgataatgtcgggcaatcaggtgcgacaatctatcgattgtatgggaagcccgatgcgccagagttgtttctgaaacatggcaaaggtagcgttgccaatgatgttacagatgagatggtcagactaaactggctgacggaatttatgcctcttccgaccatcaagcattttatccgtactcctgatgatgcatggttactcaccactgcgatccctgggaaaacagcattccaggtattagaagaatatcctgattcaggtgaaaatattgttgatgcgctggcagtgttcctgcgccggttgcattcgattcctgtttgtaattgtccttttaacagcgatcgcgtatttcgtctcgctcaggcgcaatcacgaatgaataacggtttggttgatgcgagtgattttgatgacgagcgtaatggctggcctgttgaacaagtctggaaagaaatgcataaacttttgccattctcaccggattcagtcgtcactcatggtgatttctcacttgataaccttatttttgacgaggggaaattaataggttgtattgatgttggacgagtcggaatcgcagaccgataccaggatcttgccatcctatggaactgcctcggtgagttttctccttcattacagaaacggctttttcaaaaatatggtattgataatcctgatatgaataaattgcagtttcatttgatgctcgatgagtttttctaaaagcttgtgcaatgccacaaagaagagtcaatcgcagacaacattttgaatgcggtcacacgttagcagcatgattgccacggatggcaacatattaacggcatgatattgacttattgaataaaattgggtaaatttgactcaacgatgggttaattcgctcgttgtggtagtgagatgaaaagaggcggcgcttactaccgattccgcctagttggtcacttcgacgtatcgtctggaactccaaccatcgcaggcagagaggtctgcaaaatgcaatcccgaaacagttcgcaggtaatagttagagcctgcataacggtttcgggattttttatatctgcacaacaggtaagagcattgagtcgataatcgtgaagagtcggcgagcctggttagccagtgctctttccgttgtgctgaattaagcgaataccggaagcagaaccggatcaccaaatgcgtacaggcgtcatcgccgcccagcaacagcacaacccaaactgagccgtagccactgtctgtcctgaattcattagtaatagttacgctgcggccttttacacatgaccttcgtgaaagcgggtggcaggaggtcgcgctaacaacctcctgccgttttgcccgtgcatatcggtcacgaacaaatctgattactaaacacagtagcctggatttgttctatcagtaatcgaccttattcctaattaaatagagcaaatccccttattgggggtaagacatgaagatgccagaaaaacatgacctgttggccgccattctcgcggcaaaggaacaaggcatcggggcaatccttgcgtttgcaatggcgtaccttcgcggcagatataatggcggtgcgtttacaaaaacagtaatcgacgcaacgatgtgcgccattatcgcctggttcattcgtgaccttctcgacttcgccggactaagtagcaatctcgcttatataacgagcgtgtttatcggctacatcggtactgactcgattggttcgcttatcaaacgcttcgctgctaaaaaagccggagtagaagatggtagaaatcaataatcaacgtaaggcgttcctcgatatgctggcgtggtcggagggaactgataacggacgtcagaaaaccagaaatcatggttatgacgtcattgtaggcggagagctatttactgattactccgatcaccctcgcaaacttgtcacgctaaacccaaaactcaaatcaacaggcgccggacgctaccagcttctttcccgttggtgggatgcctaccgcaagcagcttggcctgaaagacttctctccgaaaagtcaggacgctgtggcattgcagcagattaaggagcgtggcgctttacctatgattgatcgtggtgatatccgtcaggcaatcgaccgttgcagcaatatctgggcttcactgccgggcgctggttatggtcagttcgagcataaggctgacagcctgattgcaaaattcaaagaagcgggcggaacggtcagagagattgatgtatgagcagagtcaccgcgattatctccgctctggttatctgcatcatcgtctgcctgtcatgggctgttaatcattaccgtgataacgccattacctacaaagcccagcgcgacaaaaatgccagagaactgaagctggcgaacgcggcaattactgacatgcagatgcgtcagcgtgatgttgctgcgctcgatgcaaaatacacgaaggagttagctgatgctaaagctgaaaatgatgctctgcgtgatgatgttgccgctggtcgtcgtcggttgcacatcaaagcagtctgtcagtcagtgcgtgaagccaccaccgcctccggcgtggataatgcagcctccccccgactggcagacaccgctgaacgggattatttcaccctcagagagaggctgatcactatgcaaaaacaactggaaggaacccagaagtatattaatgagcagtgcagatagagttgcccatatcgatgggcaactcatgcaattattgtgagcaatacacacgcgcttccagcggagtataaatgcctaaagtaataaaaccgagcaatccatttacgaatgtttgctgggtttctgttttaacaacattttctgcgccgccacaaattttggctgcatcgacagttttcttctgcccaattccagaaacgaagaaatgatgggtgatggtttcctttggtgctactgctgccggtttgttttgaacagtaaacgtctgttgagcacatcctgtaataagcagggccagcgcagtagcgagtagcatttttttcatggtgttattcccgatgctttttgaagttcgcagaatcgtatgtgtagaaaattaaacaaaccctaaacaatgagttgaaatttcatattgttaatatttattaatgtatgtcaggtgcgatgaatcgtcattgtattcccggattaactatgtccacagccctgacggggaacttctctgcgggagtgtccgggaataattaaaacgatgcacacagggtttagcgcgtacacgtattgcattatgccaacgccccggtgctgacacggaagaaaccggacgttatgatttagcgtggaaagatttgtgtagtgttctgaatgctctcagtaaatagtaatgaattatcaaaggtatagtaatatcttttatgttcatggatatttgtaacccatcggaaaactcctgctttagcaagattttccctgtattgctgaaatgtgatttctcttgatttcaacctatcataggacgtttctataagatgcgtgtttcttgagaatttaacatttacaacctttttaagtccttttattaacacggtgttatcgttttctaacacgatgtgaatattatctgtggctagatagtaaatataatgtgagacgttgtgacgtttgctagcctgtcagaccaagtttactcatatatactttagattgatttaaaacttcatttttaatttaaaaggatctaggtgaagatcctttttgataatctcatgaccaaaatcccttaacgtgagttttcgttccactgagcgtcagaccccgtagaaaagatcaaaggatcttcttgagatcctttttttctgcgcgtaatctgctgcttgcaaacaaaaaaaccaccgctaccagcggtggtttgtttgccggatcaagagctaccaactctttttccgaaggtaactggcttcagcagagcgcagataccaaatactgttcttctagtgtagccgtagttaggccaccacttcaagaactctgtagcaccgcctacatacctcgctctgctaatcctgttaccagtggctgctgccagtggcgataagtcgtgtcttaccgggttggactcaagacgatagttaccggataaggcgcagcggtcgggctgaacggggggttcgtgcacacagcccagcttggagcgaacgacctacaccgaactgagatacctacagcgtgagctatgagaaagcgccacgcttcccgaagggagaaaggcggacaggtatccggtaagcggcagggtcggaacaggagagcgcacgagggagcttccagggggaaacgcctggtatctttatagtcctgtcgggtttcgccacctctgacttgagcgtcgatttttgtgatgctcgtcaggggggcggagcctatggaaaaacgccagcaacgcggcctttttacggttcctggccttttgctggccttttgctcacatgttctttcctgcgttatcccctgattctgtggataaccgtattaccgcctttgagtgagctgataccgctcgccgcagccgaacgaccgagcgcagcgagtcagtgagcgaggaagcggaagagcgcccaatacgcaaaccgcctctccccgcgcgttggccgattcattaatgcagctggcacgacaggtttcccgactggaaagcgggcagtgagcgcaacgcaattaatgtgagttagctcactcattaggcaccccaggctttacactttatgcttccggctcgtatgttgtgtggaattgtgagcggataacaatttcacacaggaaacagctatgaccatgattacgccaagtttgcacgcctgccgttcgacgatttcgcgagttggttcagctgctgcctgaggctggacgacctcgcggagttctaccggcagtgcaaatccgtcggcatccaggaaaccagcagcggctatccgcgcatccatgcccccgaactgcaggagtggggaggcacgatggccgctttggtccggatctttgtgaaggaaccttacttctgtggtgtgacataattggacaaactacctacagagatttaaagctctaaggtaaatataaaatttttaagtgtataatgtgttaaactactgattctaattgtttgtgtattttagattccaacctatggaactgatgaatgggagcagtggtggaatgcctttaatgaggaaaacctgttttgctcagaagaaatgccatctagtgatgatgaggctactgctgactctcaacattctactcctccaaaaaagaagagaaaggtagaagaccccaaggactttccttcagaattgctaagttttttgagtcatgctgtgtttagtaatagaactcttgcttgctttgctatttacaccacaaaggaaaaagctgcactgctatacaagaaaattatggaaaaatattctgtaacctttataagtaggcataacagttataatcataacatactgttttttcttactccacacaggcatagagtgt

SEQ ID NO: 59 - DNA, 11432 bp, synthetic construct
  source 1..11432: mol_type = other DNA
ctgctattaataactatgctcaaaaattgtgtacctttagctttttaatttgtaaaggggttaataaggaatatttgatgtatagtgccttgactagagatcataatcagccataccacatttgtagaggttttacttgctttaaaaaacctcccacacctccccctgaacctgaaacataaaatgaatgcaattgttgttgttctagcttggccactccctctctgcgcgctcgctcgctcactgaggccgggcgaccaaaggtcgcccgacgcccgggctttgcccgggcggcctcagtgagcgagcgagcgcgcagagagggagtggccaactccatcactaggggttcctctcgaggagcttggcccattgcatacgttgtatccatatcataatatgtacatttatattggctcatgtccaacattaccgccatgttactagtgtcgacaggctcagaggcacacaggagtttctgggctcaccctgcccccttccaacccctcagttcccatcctccagcagctgtttgtgtgctgcctctgaagtccacactgaacaaacttcagcctactcatgtccctaaaatgggcaaacattgcaagcagcaaacagcaaacacacagccctccctgcctgctgaccttggagctggggcagaggtcagagacctctctgggcccatgccacctccaacatccactcgaccccttggaatttcggtggagaggagcagaggttgtcctggcgtggtttaggtagtgtgagaggggtcgacgatcttgctaccagtggaacagccactaaggattctgcagtgagagcagagggccagctaagtggtactctcccagagactgtctgactcacgccaccccctccaccttggacacaggacgctgtggtttctgagccaggtacaatgactcctttcggtaagtgcagtggaagctgtacactgcccaggcaaagcgtccgggcagcgtaggcgggcgactcagatcccagccagtggacttagcccctgtttgctcctccgataactggggtgaccttggttaatattcaccagcagcctcccccgttgcccctctggatccactgcttaaatacggacgaggacagggccctgtctcctcagcttcaggcaccaccactgacctgggacagtgaatcgtaagtatgcctttcactgcgagaggttctggagaggcttctgagctccccatggcccaggcaggcagcaggtctggggcaggaggggggttgtggagtgggtatccgcctgctgaggtgcagggcagatcatcatgtgccttgactcggggcctggcccccccatctctgtcttgcaggacaattgccgtcttctgtctcgtggggcatcctcctgctggcaggcctgtgctgcctggtccctgtctccctggctgaggaccgggtaccgccaccatgagcacagcagtgcttgagaaccctggcctgggcaggaagctgtctgactttggccaggagactagctacattgaggacaactgcaaccaaaatggagccatcagcctgatcttctccctgaaggaagaggttggagcccttgccaaggtcctgagactgtttgaggagaatgatgtgaacctcacccacatagagagcagacctagcaggctgaaaaaggatgagtatgagttcttcacccacctggacaagaggagcctgccagccttaaccaacatcatcaagatcttgagacatgacattggagccacagtgcatgaactctctagagacaagaagaaggacactgtgccttggttccctagaaccatccaggaactggacagatttgccaaccagatcctgagctatggagctgagctggatgctgaccaccctggcttcaaggaccctgtgtacagagccaggagaaagcagtttgctgacattgcctacaactacagacacggccagcccatccccagagtggagtacatggaggaagagaagaagacctggggcacagtgttcaagaccctgaagagcctgtacaagacccatgcctgttatgaatacaaccacatcttccctctgctggaaaagtactgtggcttccacgaagacaacatcccacagctggaggatgtgtcccagttcctgcagacctgcacaggcttcagactgagacctgtggctggcctgctgagcagcagagacttcctgggaggcctggccttcagggtgttccactgcacccagtacatcagacacggcagcaagcccatgtacaccccagagcctgacatctgccatgagctgctgggccatgtgcctctgttcagtgatagaagctttgcccagttctcccaggaaattggcctggccagcctgggggcccctgatgagtacatagaaaaactggccaccatctactggttcacagttgagtttggcctgtgtaaacagggtgacagcatcaaggcctatggagctggcctgctgagcagctttggagagctgcagtactgcctgtctgagaagcccaagctgctgcctctggagctggaaaagacagctatccaaaactacacagtgacagagttccaacccctgtactatgtggcagaatccttcaatgatgccaaggagaaggtgagaaactttgctgccaccatccctagacccttctctgtgaggtatgacccttacacccagagaatagaagtgctggataacacccagcagctgaaaatcttggctgacagcatcaactctgaaattggcatcctgtgctctgccctgcagaaaatcaaatgaagatctgcctcgactgtgccttctagttgccagccatctgttgtttgcccctcccccgtgccttccttgaccctggaaggtgccactcccactgtcctttcctaataaaatgaggaaattgcatcgcattgtctgagtaggtgtcattctattctggggggtggggtggggcaggacagcaagggggaggattgggaagacaatagcaggcatgctggggatgcggtgggctctatggggcgcgccgtacccattgccaagttctgacaactgtctgtctatagccaattatgcatttcttaaattagaacccccccaatatacccaaatatatatatatgtgtgcatatatatagtaagttgtaacaaagttgtgaattcatacctgaagtatctcaagtgatgcaagttttatgaatttttgtttatgccttttgggaagagttgtattgacaaattttttatgcttaaagtaaaccataaatcaaaaaaataaaatctaggatgcaataaaacaaaacaacttcttgacataagtatggtatgtaaatctgttttgattggaaatcaatttgttatattgccagaattcctgttttagaatacatctctgctgatctgtctgtattcttagactgcatatctgggatgaactctgggcagaattcacatgggcttcctttgaaataaacaagacttttcaaattcttagtcgatctgcagaacctgtagccaggcactgaaccattttgatagatgcagtaatcgttgcaagtgtatatttcaaggagttctggctgggtcctagtttatgcttgtggcagaagcagtgagtaactgggaggaagttggtgagtaagcttcaaggaagaagtcatttttagtactctggatcttcctgattttaaagcactacaaaatggtgcattttcattcttgtcaagtgataacagatatattctgatgagcctgaaatgaatatatattgtatcatttttataatatctagcaaggtttgtattttcctagaacttgaactaaatttcagttcataaaatttataaaatacttagttgttgtaaaatatttttggaatgttcacataggtgacacacaaatgtcccattttcattctttctatagtaaatatgttctgatatgtgaaggtttagcagatgcatcagcatttaatcctagaggatctggcataatcttttcccccaagaatagaaattttttctgcttatgaaagtagtacatgtttctttaaaaacaaatcaatattgacttctgcctgctgtatagcactatgcctccacctggccatgaccaggggcatgtcctggtccacctacctgaaaatgtttgcaaccagcctcctggccatgtgcacaggggctgaagttgtcccacaggtattacgggccaacctgacaatacatgaagttccaccaaagtctgagaactcagaactgagctttggggactgaaagacagcacaaacctcaaatttctcagcactggaaacctcaaaatataactgaattccataaataagattttaagtcttaaatatgtatttttaaatgtattaaaagtcaagctgcttgtatttaagcacctaatacaatgcttaggttgtaaaaggagatgctcaataggtactaactgatatattgagatttaattatggtttgaccaatatttattggaaaccgccaaagcttaaatcatcagcttcttgaatgtgatttgaaaggtaatttagtattgaatagcatgtgagctagagtatttcattctttctggtttatttcttcaaatagactttgaatataatggtgaatgggtattataaattaactaataaaaatgacattgaaaatgaaaaaatatatatattaaagtgtagaaagtgaccaggcaccggtggatcccctaactacaaggaacccctagtgatggagttggccactccctctctgcgcgctcgctcgctcactgaggccgggcgaccaaaggtcgcccgacgcccgggctttgcccgggcggcctcagtgagcgagcgagcgcgcagagagggagtggccaacaggaagctcctctgtgtcctcataaaccctaacctcctctacttgagaggacattccaatcataggctgcccatccaccctctgtgtcctcctgttaattaggtcacttaacaaaaaggaaattgggtaggggtttttcacagaccgctttctaagggtaattttaaaatatctgggaagtcccttccactgctgtgttccagaagtgttggtaaacagcccacaaatgtcaacagcagaaacatacaagctgtcagctttgcacaagggcccaatctctggaagatccgcgcgtaccgagttctaattcactggccgtcgttttacaacgtcgtgactgggaaaaccctggcgttacccaacttaatcgccttgcagcacatccccctttcgccagctggcgtaatagcgaagaggcccgcaccgatcgcccttcccaacagttgcgcagcctgaatggcgaatggcgcctgatgcggtattttctccttacgcatctgtgcggtatttcacaccgcatatggtgcactctcagtacaatctgctctgatgccgcatagttaagccagccccgacacccgccaacacccgctgacgcgccctgacgggcttgtctgctcccggcatccgcttacagacaagctgtgaccgtctccgggagctgcatgtgtcagaggttttcaccgtcatcaccgaaacgcgcgagacgaaagggcctcgtgatacgcctatttttataggttaatgtcatgataataatggtttcttagacgtcaggtggcacttttcggggaaatgtgcgcggaacccccatttgtttatttttctaaatacattcaaatatgtatccgctcatgagacaataaccctgataaatgcttcaataatattgaaaaaggaagagtatgagccatattcaacgggaaacgtcttgctctaggccgcgattaaattccaacatggatgctgatttatatgggtataaatgggctcgcgataatgtcgggcaatcaggtgcgacaatctatcgattgtatgggaagcccgatgcgccagagttgtttctgaaacatggcaaaggtagcgttgccaatgatgttacagatgagatggtcagactaaactggctgacggaatttatgcctcttccgaccatcaagcattttatccgtactcctgatgatgcatggttactcaccactgcgatccctgggaaaacagcattccaggtattagaagaatatcctgattcaggtgaaaatattgttgatgcgctggcagtgttcctgcgccggttgcattcgattcctgtttgtaattgtccttttaacagcgatcgcgtatttcgtctcgctcaggcgcaatcacgaatgaataacggtttggttgatgcgagtgattttgatgacgagcgtaatggctggcctgttgaacaagtctggaaagaaatgcataaacttttgccattctcaccggattcagtcgtcactcatggtgatttctcacttgataaccttatttttgacgaggggaaattaataggttgtattgatgttggacgagtcggaatcgcagaccgataccaggatcttgccatcctatggaactgcctcggtgagttttctccttcattacagaaacggctttttcaaaaatatggtattgataatcctgatatgaataaattgcagtttcatttgatgctcgatgagtttttctaaaagcttgtgcaatgccacaaagaagagtcaatcgcagacaacattttgaatgcggtcacacgttagcagcatgattgccacggatggcaacatattaacggcatgatattgacttattgaataaaattgggtaaatttgactcaacgatgggttaattcgctcgttgtggtagtgagatgaaaagaggcggcgcttactaccgattccgcctagttggtcacttcgacgtatcgtctggaactccaaccatcgcaggcagagaggtctgcaaaatgcaatcccgaaacagttcgcaggtaatagttagagcctgcataacggtttcgggattttttatatctgcacaacaggtaagagcattgagtcgataatcgtgaagagtcggcgagcctggttagccagtgctctttccgttgtgctgaattaagcgaataccggaagcagaaccggatcaccaaatgcgtacaggcgtcatcgccgcccagcaacagcacaacccaaactgagccgtagccactgtctgtcctgaattcattagtaatagttacgctgcggccttttacacatgaccttcgtgaaagcgggtggcaggaggtcgcgctaacaacctcctgccgttttgcccgtgcatatcggtcacgaacaaatctgattactaaacacagtagcctggatttgttctatcagtaatcgaccttattcctaattaaatagagcaaatccccttattgggggtaagacatgaagatgccagaaaaacatgacctgttggccgccattctcgcggcaaaggaacaaggcatcggggcaatccttgcgtttgcaatggcgtaccttcgcggcagatataatggcggtgcgtttacaaaaacagtaatcgacgcaacgatgtgcgccattatcgcctggttcattcgtgaccttctcgacttcgccggactaagtagcaatctcgcttatataacgagcgtgtttatcggctacatcggtactgactcgattggttcgcttatcaaacgcttcgctgctaaaaaagccggagtagaagatggtagaaatcaataatcaacgtaaggcgttcctcgatatgctggcgtggtcggagggaactgataacggacgtcagaaaaccagaaatcatggttatgacgtcattgtaggcggagagctatttactgattactccgatcaccctcgcaaacttgtcacgctaaacccaaaactcaaatcaacaggcgccggacgctaccagcttctttcccgttggtgggatgcctaccgcaagcagcttggcctgaaagacttctctccgaaaagtcaggacgctgtggcattgcagcagattaaggagcgtggcgctttacctatgattgatcgtggtgatatccgtcaggcaatcgaccgttgcagcaatatctgggcttcactgccgggcgctggttatggtcagttcgagcataaggctgacagcctgattgcaaaattcaaagaagcgggcggaacggtcagagagattgatgtatgagcagagtcaccgcgattatctccgctctggttatctgcatcatcgtctgcctgtcatgggctgttaatcattaccgtgataacgccattacctacaaagcccagcgcgacaaaaatgccagagaactgaagctggcgaacgcggcaattactgacatgcagatgcgtcagcgtgatgttgctgcgctcgatgcaaaatacacgaaggagttagctgatgctaaagctgaaaatgatgctctgcgtgatgatgttgccgctggtcgtcgtcggttgcacatcaaagcagtctgtcagtcagtgcgtgaagccaccaccgcctccggcgtggataatgcagcctccccccgactggcagacaccgctgaacgggattatttcaccctcagagagaggctgatcactatgcaaaaacaactggaaggaacccagaagtatattaatgagcagtgcagatagagttgcccatatcgatgggcaactcatgcaattattgtgagcaatacacacgcgcttccagcggagtataaatgcctaaagtaataaaaccgagcaatccatttacgaatgtttgctgggtttctgttttaacaacattttctgcgccgccacaaattttggctgcatcgacagttttcttctgcccaattccagaaacgaagaaatgatgggtgatggtttcctttggtgctactgctgccggtttgttttgaacagtaaacgtctgttgagcacatcctgtaataagcagggccagcgcagtagcgagtagcatttttttcatggtgttattcccgatgctttttgaagttcgcagaatcgtatgtgtagaaaattaaacaaaccctaaacaatgagttgaaatttcatattgttaatatttattaatgtatgtcaggtgcgatgaatcgtcattgtattcccggattaactatgtccacagccctgacggggaacttctctgcgggagtgtccgggaataattaaaacgatgcacacagggtttagcgcgtacacgtattgcattatgccaacgccccggtgctgacacggaagaaaccggacgttatgatttagcgtggaaagatttgtgtagtgttctgaatgctctcagtaaatagtaatgaattatcaaaggtatagtaatatcttttatgttcatggatatttgtaacccatcggaaaactcctgctttagcaagattttccctgtattgctgaaatgtgatttctcttgatttcaacctatcataggacgtttctataagatgcgtgtttcttgagaatttaacatttacaacctttttaagtccttttattaacacggtgttatcgttttctaacacgatgtgaatattatctgtggctagatagtaaatataatgtgagacgttgtgacgtttgctagcctgtcagaccaagtttactcatatatactttagattgatttaaaacttcatttttaatttaaaaggatctaggtgaagatcctttttgataatctcatgaccaaaatcccttaacgtgagttttcgttccactgagcgtcagaccccgtagaaaagatcaaaggatcttcttgagatcctttttttctgcgcgtaatctgctgcttgcaaacaaaaaaaccaccgctaccagcggtggtttgtttgccggatcaagagctaccaactctttttccgaaggtaactggcttcagcagagcgcagataccaaatactgttcttctagtgtagccgtagttaggccaccacttcaagaactctgtagcaccgcctacatacctcgctctgctaatcctgttaccagtggctgctgccagtggcgataagtcgtgtcttaccgggttggactcaagacgatagttaccggataaggcgcagcggtcgggctgaacggggggttcgtgcacacagcccagcttggagcgaacgacctacaccgaactgagatacctacagcgtgagctatgagaaagcgccacgcttcccgaagggagaaaggcggacaggtatccggtaagcggcagggtcggaacaggagagcgcacgagggagcttccagggggaaacgcctggtatctttatagtcctgtcgggtttcgccacctctgacttgagcgtcgatttttgtgatgctcgtcaggggggcggagcctatggaaaaacgccagcaacgcggcctttttacggttcctggccttttgctggccttttgctcacatgttctttcctgcgttatcccctgattctgtggataaccgtattaccgcctttgagtgagctgataccgctcgccgcagccgaacgaccgagcgcagcgagtcagtgagcgaggaagcggaagagcgcccaatacgcaaaccgcctctccccgcgcgttggccgattcattaatgcagctggcacgacaggtttcccgactggaaagcgggcagtgagcgcaacgcaattaatgtgagttagctcactcattaggcaccccaggctttacactttatgcttccggctcgtatgttgtgtggaattgtgagcggataacaatttcacacaggaaacagctatgaccatgattacgccaagtttgcacgcctgccgttcgacgatttcgcgagttggttcagctgctgcctgaggctggacgacctcgcggagttctaccggcagtgcaaatccgtcggcatccaggaaaccagcagcggctatccgcgcatccatgcccccgaactgcaggagtggggaggcacgatggccgctttggtccggatctttgtgaaggaaccttacttctgtggtgtgacataattggacaaactacctacagagatttaaagctctaaggtaaatataaaatttttaagtgtataatgtgttaaactactgattctaattgtttgtgtattttagattccaacctatggaactgatgaatgggagcagtggtggaatgcctttaatgaggaaaacctgttttgctcagaagaaatgccatctagtgatgatgaggctactgctgactctcaacattctactcctccaaaaaagaagagaaaggtagaagaccccaaggactttccttcagaattgctaagttttttgagtcatgctgtgtttagtaatagaactcttgcttgctttgctatttacaccacaaaggaaaaagctgcactgctatacaagaaaattatggaaaaatattctgtaacctttataagtaggcataacagttataatcataacatactgttttttcttactccacacaggcatagagtgt

SEQ ID NO: 60 - DNA, 11432 bp, synthetic construct
  source 1..11432: mol_type = other DNA
ctgctattaataactatgctcaaaaattgtgtacctttagctttttaatttgtaaaggggttaataaggaatatttgatgtatagtgccttgactagagatcataatcagccataccacatttgtagaggttttacttgctttaaaaaacctcccacacctccccctgaacctgaaacataaaatgaatgcaattgttgttgttctagcttggccactccctctctgcgcgctcgctcgctcactgaggccgggcgaccaaaggtcgcccgacgcccgggctttgcccgggcggcctcagtgagcgagcgagcgcgcagagagggagtggccaactccatcactaggggttcctctcgaggagcttggcccattgcatacgttgtatccatatcataatatgtacatttatattggctcatgtccaacattaccgccatgttactagtgtcgacaggctcagaggcacacaggagtttctgggctcaccctgcccccttccaacccctcagttcccatcctccagcagctgtttgtgtgctgcctctgaagtccacactgaacaaacttcagcctactcatgtccctaaaatgggcaaacattgcaagcagcaaacagcaaacacacagccctccctgcctgctgaccttggagctggggcagaggtcagagacctctctgggcccatgccacctccaacatccactcgaccccttggaatttcggtggagaggagcagaggttgtcctggcgtggtttaggtagtgtgagaggggtcgacgatcttgctaccagtggaacagccactaaggattctgcagtgagagcagagggccagctaagtggtactctcccagagactgtctgactcacgccaccccctccaccttggacacaggacgctgtggtttctgagccaggtacaatgactcctttcggtaagtgcagtggaagctgtacactgcccaggcaaagcgtccgggcagcgtaggcgggcgactcagatcccagccagtggacttagcccctgtttgctcctccgataactggggtgaccttggttaatattcaccagcagcctcccccgttgcccctctggatccactgcttaaatacggacgaggacagggccctgtctcctcagcttcaggcaccaccactgacctgggacagtgaatcgtaagtatgcctttcactgcgagaggttctggagaggcttctgagctccccatggcccaggcaggcagcaggtctggggcaggaggggggttgtggagtgggtatccgcctgctgaggtgcagggcagatcatcatgtgccttgactcggggcctggcccccccatctctgtcttgcaggacaattgccgtcttctgtctcgtggggcatcctcctgctggcaggcctgtgctgcctggtccctgtctccctggctgaggaccgggtaccgccaccatgagcacagcagtgttggagaaccctggcctgggcaggaaactgtctgactttggccaggaaaccagctacattgaggataactgtaaccagaatggagccatcagcctgatcttcagcctgaaagaggaggtgggggccctggccaaggtgctgagactgtttgaggaaaatgatgtcaacctgacccacattgagtccagacccagcagactcaagaaagatgaatatgagttcttcacacacctggacaagagaagcctgcctgccctgaccaacatcatcaagatcctgagacatgacataggagccacagtgcatgaactgagcagagacaagaagaaggacacagtgccctggttccctagaaccatccaggaactggacagatttgccaaccagatcctgagttatggagctgagctggatgctgaccacccaggcttcaaggaccctgtgtacagagccagaaggaagcagtttgctgacattgcctacaactacagacacggccagcctatccccagagtggaatacatggaagaggagaagaagacctggggcactgtgttcaagacccttaagtctctgtacaaaacccacgcctgctatgaatacaaccacatcttccctctgctggagaagtactgtggcttccacgaagacaatatcccccagctggaggatgtgagccagttcctgcaaacctgcactggcttcagactgagacctgtggcaggcctgctgagcagcagagacttcctgggtggcctggccttcagagtcttccactgtacccagtacatcaggcatggcagcaagcccatgtacacaccagagcctgacatctgccacgagctgctgggccatgtgcctctgttctcagacagaagctttgcccagttctcccaggagattggcttagcctccttaggagcccctgatgaatacatagagaaactggccaccatctactggttcacagtggagtttggcctgtgcaagcaaggtgacagcatcaaggcctatggagctggcctgctgagcagctttggagaacttcagtactgcctctctgagaagcccaaactgctgcctctggaactggagaagacagccatccagaactacacagtgacagaattccaacctctgtactatgttgctgagagcttcaatgatgccaaagagaaggtgagaaactttgctgccaccatccccagacccttctctgtgaggtatgacccttacacccagagaattgaagtgctggataacacccagcagctgaagatcctagctgacagcatcaactctgagataggcatcctgtgctctgccctgcaaaagatcaagtgaagatctgcctcgactgtgccttctagttgccagccatctgttgtttgcccctcccccgtgccttccttgaccctggaaggtgccactcccactgtcctttcctaataaaatgaggaaattgcatcgcattgtctgagtaggtgtcattctattctggggggtggggtggggcaggacagcaagggggaggattgggaagacaatagcaggcatgctggggatgcggtgggctctatggggcgcgccgtacccattgccaagttctgacaactgtctgtctatagccaattatgcatttcttaaattagaacccccccaatatacccaaatatatatatatgtgtgcatatatatagtaagttgtaacaaagttgtgaattcatacctgaagtatctcaagtgatgcaagttttatgaatttttgtttatgccttttgggaagagttgtattgacaaattttttatgcttaaagtaaaccataaatcaaaaaaataaaatctaggatgcaataaaacaaaacaacttcttgacataagtatggtatgtaaatctgttttgattggaaatcaatttgttatattgccagaattcctgttttagaatacatctctgctgatctgtctgtattcttagactgcatatctgggatgaactctgggcagaattcacatgggcttcctttgaaataaacaagacttttcaaattcttagtcgatctgcagaacctgtagccaggcactgaaccattttgatagatgcagtaatcgttgcaagtgtatatttcaaggagttctggctgggtcctagtttatgcttgtggcagaagcagtgagtaactgggaggaagttggtgagtaagcttcaaggaagaagtcatttttagtactctggatcttcctgattttaaagcactacaaaatggtgcattttcattcttgtcaagtgataacagatatattctgatgagcctgaaatgaatatatattgtatcatttttataatatctagcaaggtttgtattttcctagaacttgaactaaatttcagttcataaaatttataaaatacttagttgttgtaaaatatttttggaatgttcacataggtgacacacaaatgtcccattttcattctttctatagtaaatatgttctgatatgtgaaggtttagcagatgcatcagcatttaatcctagaggatctggcataatcttttcccccaagaatagaaattttttctgcttatgaaagtagtacatgtttctttaaaaacaaatcaatattgacttctgcctgctgtatagcactatgcctccacctggccatgaccaggggcatgtcctggtccacctacctgaaaatgtttgcaaccagcctcctggccatgtgcacaggggctgaagttgtcccacaggtattacgggccaacctgacaatacatgaagttccaccaaagtctgagaactcagaactgagctttggggactgaaagacagcacaaacctcaaatttctcagcactggaaacctcaaaatataactgaattccataaataagattttaagtcttaaatatgtatttttaaatgtattaaaagtcaagctgcttgtatttaagcacctaatacaatgcttaggttgtaaaaggagatgctcaataggtactaactgatatattgagatttaattatggtttgaccaatatttattggaaaccgccaaagcttaaatcatcagcttcttgaatgtgatttgaaaggtaatttagtattgaatagcatgtgagctagagtatttcattctttctggtttatttcttcaaatagactttgaatataatggtgaatgggtattataaattaactaataaaaatgacattgaaaatgaaaaaatatatatattaaagtgtagaaagtgaccaggcaccggtggatcccctaactacaaggaacccctagtgatggagttggccactccctctctgcgcgctcgctcgctcactgaggccgggcgaccaaaggtcgcccgacgcccgggctttgcccgggcggcctcagtgagcgagcgagcgcgcagagagggagtggccaacaggaagctcctctgtgtcctcataaaccctaacctcctctacttgagaggacattccaatcataggctgcccatccaccctctgtgtcctcctgttaattaggtcacttaacaaaaaggaaattgggtaggggtttttcacagaccgctttctaagggtaattttaaaatatctgggaagtcccttccactgctgtgttccagaagtgttggtaaacagcccacaaatgtcaacagcagaaacatacaagctgtcagctttgcacaagggcccaatctctggaagatccgcgcgtaccgagttctaattcactggccgtcgttttacaacgtcgtgactgggaaaaccctggcgttacccaacttaatcgccttgcagcacatccccctttcgccagctggcgtaatagcgaagaggcccgcaccgatcgcccttcccaacagttgcgcagcctgaatggcgaatggcgcctgatgcggtattttctccttacgcatctgtgcggtatttcacaccgcatatggtgcactctcagtacaatctgctctgatgccgcatagttaagccagccccgacacccgccaacacccgctgacgcgccctgacgggcttgtctgctcccggcatccgcttacagacaagctgtgaccgtctccgggagctgcatgtgtcagaggttttcaccgtcatcaccgaaacgcgcgagacgaaagggcctcgtgatacgcctatttttataggttaatgtcatgataataatggtttcttagacgtcaggtggcacttttcggggaaatgtgcgcggaacccccatttgtttatttttctaaatacattcaaatatgtatccgctcatgagacaataaccctgataaatgcttcaataatattgaaaaaggaagagtatgagccatattcaacgggaaacgtcttgctctaggccgcgattaaattccaacatggatgctgatttatatgggtataaatgggctcgcgataatgtcgggcaatcaggtgcgacaatctatcgattgtatgggaagcccgatgcgccagagttgtttctgaaacatggcaaaggtagcgttgccaatgatgttacagatgagatggtcagactaaactggctgacggaatttatgcctcttccgaccatcaagcattttatccgtactcctgatgatgcatggttactcaccactgcgatccctgggaaaacagcattccaggtattagaagaatatcctgattcaggtgaaaatattgttgatgcgctggcagtgttcctgcgccggttgcattcgattcctgtttgtaattgtccttttaacagcgatcgcgtatttcgtctcgctcaggcgcaatcacgaatgaataacggtttggttgatgcgagtgattttgatgacgagcgtaatggctggcctgttgaacaagtctggaaagaaatgcataaacttttgccattctcaccggattcagtcgtcactcatggtgatttctcacttgataaccttatttttgacgaggggaaattaataggttgtattgatgttggacgagtcggaatcgcagaccgataccaggatcttgccatcctatggaactgcctcggtgagttttctccttcattacagaaacggctttttcaaaaatatggtattgataatcctgatatgaataaattgcagtttcatttgatgctcgatgagtttttctaaaagcttgtgcaatgccacaaagaagagtcaatcgcagacaacattttgaatgcggtcacacgttagcagcatgattgccacggatggcaacatattaacggcatgatattgacttattgaataaaattgggtaaatttgactcaacgatgggttaattcgctcgttgtggtagtgagatgaaaagaggcggcgcttactaccgattccgcctagttggtcacttcgacgtatcgtctggaactccaaccatcgcaggcagagaggtctgcaaaatgcaatcccgaaacagttcgcaggtaatagttagagcctgcataacggtttcgggattttttatatctgcacaacaggtaagagcattgagtcgataatcgtgaagagtcggcgagcctggttagccagtgctctttccgttgtgctgaattaagcgaataccggaagcagaaccggatcaccaaatgcgtacaggcgtcatcgccgcccagcaacagcacaacccaaactgagccgtagccactgtctgtcctgaattcattagtaatagttacgctgcggccttttacacatgaccttcgtgaaagcgggtggcaggaggtcgcgctaacaacctcctgccgttttgcccgtgcatatcggtcacgaacaaatctgattactaaacacagtagcctggatttgttctatcagtaatcgaccttattcctaattaaatagagcaaatccccttattgggggtaagacatgaagatgccagaaaaacatgacctgttggccgccattctcgcggcaaaggaacaaggcatcggggcaatccttgcgtttgcaatggcgtaccttcgcggcagatataatggcggtgcgtttacaaaaacagtaatcgacgcaacgatgtgcgccattatcgcctggttcattcgtgaccttctcgacttcgccggactaagtagcaatctcgcttatataacgagcgtgtttatcggctacatcggtactgactcgattggttcgcttatcaaacgcttcgctgctaaaaaagccggagtagaagatggtagaaatcaataatcaacgtaaggcgttcctcgatatgctggcgtggtcggagggaactgataacggacgtcagaaaaccagaaatcatggttatgacgtcattgtaggcggagagctatttactgattactccgatcaccctcgcaaacttgtcacgctaaacccaaaactcaaatcaacaggcgccggacgctaccagcttctttcccgttggtgggatgcctaccgcaagcagcttggcctgaaagacttctctccgaaaagtcaggacgctgtggcattgcagcagattaaggagcgtggcgctttacctatgattgatcgtggtgatatccgtcaggcaatcgaccgttgcagcaatatctgggcttcactgccgggcgctggttatggtcagttcgagcataaggctgacagcctgattgcaaaattcaaagaagcgggcggaacggtcagagagattgatgtatgagcagagtcaccgcgattatctccgctctggttatctgcatcatcgtctgcctgtcatgggctgttaatcattaccgtgataacgccattacctacaaagcccagcgcgacaaaaatgccagagaactgaagctggcgaacgcggcaattactgacatgcagatgcgtcagcgtgatgttgctgcgctcgatgcaaaatacacgaaggagttagctgatgctaaagctgaaaatgatgctctgcgtgatgatgttgccgctggtcgtcgtcggttgcacatcaaagcagtctgtcagtcagtgcgtgaagccaccaccgcctccggcgtggataatgcagcctccccccgactggcagacaccgctgaacgggattatttcaccctcagagagaggctgatcactatgcaaaaacaactggaaggaacccagaagtatattaatgagcagtgcagatagagttgcccatatcgatgggcaactcatgcaattattgtgagcaatacacacgcgcttccagcggagtataaatgcctaaagtaataaaaccgagcaatccatttacgaatgtttgctgggtttctgttttaacaacattttctgcgccgccacaaattttggctgcatcgacagttttcttctgcccaattccagaaacgaagaaatgatgggtgatggtttcctttggtgctactgctgccggtttgttttgaacagtaaacgtctgttgagcacatcctgtaataagcagggccagcgcagtagcgagtagcatttttttcatggtgttattcccgatgctttttgaagttcgcagaatcgtatgtgtagaaaattaaacaaaccctaaacaatgagttgaaatttcatattgttaatatttattaatgtatgtcaggtgcgatgaatcgtcattgtattcccggattaactatgtccacagccctgacggggaacttctctgcgggagtgtccgggaataattaaaacgatgcacacagggtttagcgcgtacacgtattgcattatgccaacgccccggtgctgacacggaagaaaccggacgttatgatttagcgtggaaagatttgtgtagtgttctgaatgctctcagtaaatagtaatgaattatcaaaggtatagtaatatcttttatgttcatggatatttgtaacccatcggaaaactcctgctttagcaagattttccctgtattgctgaaatgtgatttctcttgatttcaacctatcataggacgtttctataagatgcgtgtttcttgagaatttaacatttacaacctttttaagtccttttattaacacggtgttatcgttttctaacacgatgtgaatattatctgtggctagatagtaaatataatgtgagacgttgtgacgtttgctagcctgtcagaccaagtttactcatatatactttagattgatttaaaacttcatttttaatttaaaaggatctaggtgaagatcctttttgataatctcatgaccaaaatcccttaacgtgagttttcgttccactgagcgtcagaccccgtagaaaagatcaaaggatcttcttgagatcctttttttctgcgcgtaatctgctgcttgcaaacaaaaaaaccaccgctaccagcggtggtttgtttgccggatcaagagctaccaactctttttccgaaggtaactggcttcagcagagcgcagataccaaatactgttcttctagtgtagccgtagttaggccaccacttcaagaactctgtagcaccgcctacatacctcgctctgctaatcctgttaccagtggctgctgccagtggcgataagtcgtgtcttaccgggttggactcaagacgatagttaccggataaggcgcagcggtcgggctgaacggggggttcgtgcacacagcccagcttggagcgaacgacctacaccgaactgagatacctacagcgtgagctatgagaaagcgccacgcttcccgaagggagaaaggcggacaggtatccggtaagcggcagggtcggaacaggagagcgcacgagggagcttccagggggaaacgcctggtatctttatagtcctgtcgggtttcgccacctctgacttgagcgtcgatttttgtgatgctcgtcaggggggcggagcctatggaaaaacgccagcaacgcggcctttttacggttcctggccttttgctggccttttgctcacatgttctttcctgcgttatcccctgattctgtggataaccgtattaccgcctttgagtgagctgataccgctcgccgcagccgaacgaccgagcgcagcgagtcagtgagcgaggaagcggaagagcgcccaatacgcaaaccgcctctccccgcgcgttggccgattcattaatgcagctggcacgacaggtttcccgactggaaagcgggcagtgagcgcaacgcaattaatgtgagttagctcactcattaggcaccccaggctttacactttatgcttccggctcgtatgttgtgtggaattgtgagcggataacaatttcacacaggaaacagctatgaccatgattacgccaagtttgcacgcctgccgttcgacgatttcgcgagttggttcagctgctgcctgaggctggacgacctcgcggagttctaccggcagtgcaaatccgtcggcatccaggaaaccagcagcggctatccgcgcatccatgcccccgaactgcaggagtggggaggcacgatggccgctttggtccggatctttgtgaaggaaccttacttctgtggtgtgacataattggacaaactacctacagagatttaaagctctaaggtaaatataaaatttttaagtgtataatgtgttaaactactgattctaattgtttgtgtattttagattccaacctatggaactgatgaatgggagcagtggtggaatgcctttaatgaggaaaacctgttttgctcagaagaaatgccatctagtgatgatgaggctactgctgactctcaacattctactcctccaaaaaagaagagaaaggtagaagaccccaaggactttccttcagaattgctaagttttttgagtcatgctgtgtttagtaatagaactcttgcttgctttgctatttacaccacaaaggaaaaagctgcactgctatacaagaaaattatggaaaaatattctgtaacctttataagtaggcataacagttataatcataacatactgttttttcttactccacacaggcatagagtgt

SEQ ID NO: 61 - DNA, 11432 bp, synthetic construct
  source 1..11432: mol_type = other DNA
ctgctattaataactatgctcaaaaattgtgtacctttagctttttaatttgtaaaggggttaataaggaatatttgatgtatagtgccttgactagagatcataatcagccataccacatttgtagaggttttacttgctttaaaaaacctcccacacctccccctgaacctgaaacataaaatgaatgcaattgttgttgttctagcttggccactccctctctgcgcgctcgctcgctcactgaggccgggcgaccaaaggtcgcccgacgcccgggctttgcccgggcggcctcagtgagcgagcgagcgcgcagagagggagtggccaactccatcactaggggttcctctcgaggagcttggcccattgcatacgttgtatccatatcataatatgtacatttatattggctcatgtccaacattaccgccatgttactagtgtcgacaggctcagaggcacacaggagtttctgggctcaccctgcccccttccaacccctcagttcccatcctccagcagctgtttgtgtgctgcctctgaagtccacactgaacaaacttcagcctactcatgtccctaaaatgggcaaacattgcaagcagcaaacagcaaacacacagccctccctgcctgctgaccttggagctggggcagaggtcagagacctctctgggcccatgccacctccaacatccactcgaccccttggaatttcggtggagaggagcagaggttgtcctggcgtggtttaggtagtgtgagaggggtcgacgatcttgctaccagtggaacagccactaaggattctgcagtgagagcagagggccagctaagtggtactctcccagagactgtctgactcacgccaccccctccaccttggacacaggacgctgtggtttctgagccaggtacaatgactcctttcggtaagtgcagtggaagctgtacactgcccaggcaaagcgtccgggcagcgtaggcgggcgactcagatcccagccagtggacttagcccctgtttgctcctccgataactggggtgaccttggttaatattcaccagcagcctcccccgttgcccctctggatccactgcttaaatacggacgaggacagggccctgtctcctcagcttcaggcaccaccactgacctgggacagtgaatcgtaagtatgcctttcactgcgagaggttctggagaggcttctgagctccccatggcccaggcaggcagcaggtctggggcaggaggggggttgtggagtgggtatccgcctgctgaggtgcagggcagatcatcatgtgccttgactcggggcctggcccccccatctctgtcttgcaggacaattgccgtcttctgtctcgtggggcatcctcctgctggcaggcctgtgctgcctggtccctgtctccctggctgaggaccgggtaccgccaccatgagcacagctgtgctggagaaccctggcctgggcagaaagctgtctgactttggccaggagacctcttacattgaagacaactgcaaccagaatggggccatcagcctgatcttcagtctgaaggaagaagtgggagccctggccaaggtactgagactgtttgaggaaaatgatgtcaaccttacccacattgagagcagacccagcagactgaagaaggatgagtatgagttcttcacccacctggacaaaagatccctgcctgccctgaccaacatcatcaagatcctgagacacgacattggagccacagtgcatgagctcagcagggacaagaagaaggacacagtgccctggttccctagaaccatccaggagctggacagatttgccaaccagatcctgagctatggagcagaactggatgctgaccacccaggcttcaaagaccctgtgtacagggccagaaggaagcagtttgctgacatagcctacaattacagacatggccagcccatccctagagtggagtacatggaggaggaaaagaagacctggggcactgtcttcaaaaccctgaagtccctgtacaaaacccacgcctgctatgagtacaaccacatcttccctctgctggaaaagtactgtggcttccacgaagataacatccctcagttagaggatgtgagccagttcctgcagacatgcacaggcttcagactgagaccagtggcaggcctgctgtcttccagagatttcctggggggcctggccttcagggtgttccactgcacccagtacatcaggcacggcagcaagcctatgtacacccctgagcctgacatctgccatgagctgctgggccacgtgcctctgttctctgacagaagctttgcccagttcagccaggagattggccttgccagcttaggagcccctgatgaatacatagagaagctggccaccatctactggttcacagtggaatttggcctgtgtaagcagggagacagcatcaaggcctatggagctggcctgcttagcagctttggagagctgcagtactgcctgtcagagaagcccaaactgctgccactggaactggaaaagacagccatccaaaactacacagtgacagagttccagcccctgtactatgttgctgagtctttcaatgatgccaaggagaaggtgagaaactttgctgccaccatccccagacccttctcagtgagatatgacccttacacccaaagaatagaggtgctggacaacacccagcagctgaagatcctggcagacagcatcaactctgaaattggcatcctgtgttctgccctgcaaaaaatcaagtgaagatctgcctcgactgtgccttctagttgccagccatctgttgtttgcccctcccccgtgccttccttgaccctggaaggtgccactcccactgtcctttcctaataaaatgaggaaattgcatcgcattgtctgagtaggtgtcattctattctggggggtggggtggggcaggacagcaagggggaggattgggaagacaatagcaggcatgctggggatgcggtgggctctatggggcgcgccgtacccattgccaagttctgacaactgtctgtctatagccaattatgcatttcttaaattagaacccccccaatatacccaaatatatatatatgtgtgcatatatatagtaagttgtaacaaagttgtgaattcatacctgaagtatctcaagtgatgcaagttttatgaatttttgtttatgccttttgggaagagttgtattgacaaattttttatgcttaaagtaaaccataaatcaaaaaaataaaatctaggatgcaataaaacaaaacaacttcttgacataagtatggtatgtaaatctgttttgattggaaatcaatttgttatattgccagaattcctgttttagaatacatctctgctgatctgtctgtattcttagactgcatatctgggatgaactctgggcagaattcacatgggcttcctttgaaataaacaagacttttcaaattcttagtcgatctgcagaacctgtagccaggcactgaaccattttgatagatgcagtaatcgttgcaagtgtatatttcaaggagttctggctgggtcctagtttatgcttgtggcagaagcagtgagtaactgggaggaagttggtgagtaagcttcaaggaagaagtcatttttagtactctggatcttcctgattttaaagcactacaaaatggtgcattttcattcttgtcaagtgataacagatatattctgatgagcctgaaatgaatatatattgtatcatttttataatatctagcaaggtttgtattttcctagaacttgaactaaatttcagttcataaaatttataaaatacttagttgttgtaaaatatttttggaatgttcacataggtgacacacaaatgtcccattttcattctttctatagtaaatatgttctgatatgtgaaggtttagcagatgcatcagcatttaatcctagaggatctggcataatcttttcccccaagaatagaaattttttctgcttatgaaagtagtacatgtttctttaaaaacaaatcaatattgacttctgcctgctgtatagcactatgcctccacctggccatgaccaggggcatgtcctggtccacctacctgaaaatgtttgcaaccagcctcctggccatgtgcacaggggctgaagttgtcccacaggtattacgggccaacctgacaatacatgaagttccaccaaagtctgagaactcagaactgagctttggggactgaaagacagcacaaacctcaaatttctcagcactggaaacctcaaaatataactgaattccataaataagattttaagtcttaaatatgtatttttaaatgtattaaaagtcaagctgcttgtatttaagcacctaatacaatgcttaggttgtaaaaggagatgctcaataggtactaactgatatattgagatttaattatggtttgaccaatatttattggaaaccgccaaagcttaaatcatcagcttcttgaatgtgatttgaaaggtaatttagtattgaatagcatgtgagctagagtatttcattctttctggtttatttcttcaaatagactttgaatataatggtgaatgggtattataaattaactaataaaaatgacattgaaaatgaaaaaatatatatattaaagtgtagaaagtgaccaggcaccggtggatcccctaactacaaggaacccctagtgatggagttggccactccctctctgcgcgctcgctcgctcactgaggccgggcgaccaaaggtcgcccgacgcccgggctttgcccgggcggcctcagtgagcgagcgagcgcgcagagagggagtggccaacaggaagctcctctgtgtcctcataaaccctaacctcctctacttgagaggacattccaatcataggctgcccatccaccctctgtgtcctcctgttaattaggtcacttaacaaaaaggaaattgggtaggggtttttcacagaccgctttctaagggtaattttaaaatatctgggaagtcccttccactgctgtgttccagaagtgttggtaaacagcccacaaatgtcaacagcagaaacatacaagctgtcagctttgcacaagggcccaatctctggaagatccgcgcgtaccgagttctaattcactggccgtcgttttacaacgtcgtgactgggaaaaccctggcgttacccaacttaatcgccttgcagcacatccccctttcgccagctggcgtaatagcgaagaggcccgcaccgatcgcccttcccaacagttgcgcagcctgaatggcgaatggcgcctgatgcggtattttctccttacgcatctgtgcggtatttcacaccgcatatggtgcactctcagtacaatctgctctgatgccgcatagttaagccagccccgacacccgccaacacccgctgacgcgccctgacgggcttgtctgctcccggcatccgcttacagacaagctgtgaccgtctccgggagctgcatgtgtcagaggttttcaccgtcatcaccgaaacgcgcgagacgaaagggcctcgtgatacgcctatttttataggttaatgtcatgataataatggtttcttagacgtcaggtggcacttttcggggaaatgtgcgcggaacccccatttgtttatttttctaaatacattcaaatatgtatccgctcatgagacaataaccctgataaatgcttcaataatattgaaaaaggaagagtatgagccatattcaacgggaaacgtcttgctctaggccgcgattaaattccaacatggatgctgatttatatgggtataaatgggctcgcgataatgtcgggcaatcaggtgcgacaatctatcgattgtatgggaagcccgatgcgccagagttgtttctgaaacatggcaaaggtagcgttgccaatgatgttacagatgagatggtcagactaaactggctgacggaatttatgcctcttccgaccatcaagcattttatccgtactcctgatgatgcatggttactcaccactgcgatccctgggaaaacagcattccaggtattagaagaatatcctgattcaggtgaaaatattgttgatgcgctggcagtgttcctgcgccggttgcattcgattcctgtttgtaattgtccttttaacagcgatcgcgtatttcgtctcgctcaggcgcaatcacgaatgaataacggtttggttgatgcgagtgattttgatgacgagcgtaatggctggcctgttgaacaagtctggaaagaaatgcataaacttttgccattctcaccggattcagtcgtcactcatggtgatttctcacttgataaccttatttttgacgaggggaaattaataggttgtattgatgttggacgagtcggaatcgcagaccgataccaggatcttgccatcctatggaactgcctcggtgagttttctccttcattacagaaacggctttttcaaaaatatggtattgataatcctgatatgaataaattgcagtttcatttgatgctcgatgagtttttctaaaagcttgtgcaatgccacaaagaagagtcaatcgcagacaacattttgaatgcggtcacacgttagcagcatgattgccacggatggcaacatattaacggcatgatattgacttattgaataaaattgggtaaatttgactcaacgatgggttaattcgctcgttgtggtagtgagatgaaaagaggcggcgcttactaccgattccgcctagttggtcacttcgacgtatcgtctggaactccaaccatcgcaggcagagaggtctgcaaaatgcaatcccgaaacagttcgcaggtaatagttagagcctgcataacggtttcgggattttttatatctgcacaacaggtaagagcattgagtcgataatcgtgaagagtcggcgagcctggttagccagtgctctttccgttgtgctgaattaagcgaataccggaagcagaaccggatcaccaaatgcgtacaggcgtcatcgccgcccagcaacagcacaacccaaactgagccgtagccactgtctgtcctgaattcattagtaatagttacgctgcggccttttacacatgaccttcgtgaaagcgggtggcaggaggtcgcgctaacaacctcctgccgttttgcccgtgcatatcggtcacgaacaaatctgattactaaacacagtagcctggatttgttctatcagtaatcgaccttattcctaattaaatagagcaaatccccttattgggggtaagacatgaagatgccagaaaaacatgacctgttggccgccattctcgcggcaaaggaacaaggcatcggggcaatccttgcgtttgcaatggcgtaccttcgcggcagatataatggcggtgcgtttacaaaaacagtaatcgacgcaacgatgtgcgccattatcgcctggttcattcgtgaccttctcgacttcgccggactaagtagcaatctcgcttatataacgagcgtgtttatcggctacatcggtactgactcgattggttcgcttatcaaacgcttcgctgctaaaaaagccggagtagaagatggtagaaatcaataatcaacgtaaggcgttcctcgatatgctggcgtggtcggagggaactgataacggacgtcagaaaaccagaaatcatggttatgacgtcattgtaggcggagagctatttactgattactccgatcaccctcgcaaacttgtcacgctaaacccaaaactcaaatcaacaggcgccggacgctaccagcttctttcccgttggtgggatgcctaccgcaagcagcttggcctgaaagacttctctccgaaaagtcaggacgctgtggcattgcagcagattaaggagcgtggcgctttacctatgattgatcgtggtgatatccgtcaggcaatcgaccgttgcagcaatatctgggcttcactgccgggcgctggttatggtcagttcgagcataaggctgacagcctgattgcaaaattcaaagaagcgggcggaacggtcagagagattgatgtatgagcagagtcaccgcgattatctccgctctggttatctgcatcatcgtctgcctgtcatgggctgttaatcattaccgtgataacgccattacctacaaagcccagcgcgacaaaaatgccagagaactgaagctggcgaacgcggcaattactgacatgcagatgcgtcagcgtgatgttgctgcgctcgatgcaaaatacacgaaggagttagctgatgctaaagctgaaaatgatgctctgcgtgatgatgttgccgctggtcgtcgtcggttgcacatcaaagcagtctgtcagtcagtgcgtgaagccaccaccgcctccggcgtggataatgcagcctccccccgactggcagacaccgctgaacgggattatttcaccctcagagagaggctgatcactatgcaaaaacaactggaaggaacccagaagtatattaatgagcagtgcagatagagttgcccatatcgatgggcaactcatgcaattattgtgagcaatacacacgcgcttccagcggagtataaatgcctaaagtaataaaaccgagcaatccatttacgaatgtttgctgggtttctgttttaacaacattttctgcgccgccacaaattttggctgcatcgacagttttcttctgcccaattccagaaacgaagaaatgatgggtgatggtttcctttggtgctactgctgccggtttgttttgaacagtaaacgtctgttgagcacatcctgtaataagcagggccagcgcagtagcgagtagcatttttttcatggtgttattcccgatgctttttgaagttcgcagaatcgtatgtgtagaaaattaaacaaaccctaaacaatgagttgaaatttcatattgttaatatttattaatgtatgtcaggtgcgatgaatcgtcattgtattcccggattaactatgtccacagccctgacggggaacttctctgcgggagtgtccgggaataattaaaacgatgcacacagggtttagcgcgtacacgtattgcattatgccaacgccccggtgctgacacggaagaaaccggacgttatgatttagcgtggaaagatttgtgtagtgttctgaatgctctcagtaaatagtaatgaattatcaaaggtatagtaatatcttttatgttcatggatatttgtaacccatcggaaaactcctgctttagcaagattttccctgtattgctgaaatgtgatttctcttgatttcaacctatcataggacgtttctataagatgcgtgtttcttgagaatttaacatttacaacctttttaagtccttttattaacacggtgttatcgttttctaacacgatgtgaatattatctgtggctagatagtaaatataatgtgagacgttgtgacgtttgctagcctgtcagaccaagtttactcatatatactttagattgatttaaaacttcatttttaatttaaaaggatctaggtgaagatcctttttgataatctcatgaccaaaatcccttaacgtgagttttcgttccactgagcgtcagaccccgtagaaaagatcaaaggatcttcttgagatcctttttttctgcgcgtaatctgctgcttgcaaacaaaaaaaccaccgctaccagcggtggtttgtttgccggatcaagagctaccaactctttttccgaaggtaactggcttcagcagagcgcagataccaaatactgttcttctagtgtagccgtagttaggccaccacttcaagaactctgtagcaccgcctacatacctcgctctgctaatcctgttaccagtggctgctgccagtggcgataagtcgtgtcttaccgggttggactcaagacgatagttaccggataaggcgcagcggtcgggctgaacggggggttcgtgcacacagcccagcttggagcgaacgacctacaccgaactgagatacctacagcgtgagctatgagaaagcgccacgcttcccgaagggagaaaggcggacaggtatccggtaagcggcagggtcggaacaggagagcgcacgagggagcttccagggggaaacgcctggtatctttatagtcctgtcgggtttcgccacctctgacttgagcgtcgatttttgtgatgctcgtcaggggggcggagcctatggaaaaacgccagcaacgcggcctttttacggttcctggccttttgctggccttttgctcacatgttctttcctgcgttatcccctgattctgtggataaccgtattaccgcctttgagtgagctgataccgctcgccgcagccgaacgaccgagcgcagcgagtcagtgagcgaggaagcggaagagcgcccaatacgcaaaccgcctctccccgcgcgttggccgattcattaatgcagctggcacgacaggtttcccgactggaaagcgggcagtgagcgcaacgcaattaatgtgagttagctcactcattaggcaccccaggctttacactttatgcttccggctcgtatgttgtgtggaattgtgagcggataacaatttcacacaggaaacagctatgaccatgattacgccaagtttgcacgcctgccgttcgacgatttcgcgagttggttcagctgctgcctgaggctggacgacctcgcggagttctaccggcagtgcaaatccgtcggcatccaggaaaccagcagcggctatccgcgcatccatgcccccgaactgcaggagtggggaggcacgatggccgctttggtccggatctttgtgaaggaaccttacttctgtggtgtgacataattggacaaactacctacagagatttaaagctctaaggtaaatataaaatttttaagtgtataatgtgttaaactactgattctaattgtttgtgtattttagattccaacctatggaactgatgaatgggagcagtggtggaatgcctttaatgaggaaaacctgttttgctcagaagaaatgccatctagtgatgatgaggctactgctgactctcaacattctactcctccaaaaaagaagagaaaggtagaagaccccaaggactttccttcagaattgctaagttttttgagtcatgctgtgtttagtaatagaactcttgcttgctttgctatttacaccacaaaggaaaaagctgcactgctatacaagaaaattatggaaaaatattctgtaacctttataagtaggcataacagttataatcataacatactgttttttcttactccacacaggcatagagtgt

SEQ ID NO: 62 - DNA, 11432 bp, synthetic construct
  source 1..11432: mol_type = other DNA
ctgctattaataactatgctcaaaaattgtgtacctttagctttttaatttgtaaaggggttaataaggaatatttgatgtatagtgccttgactagagatcataatcagccataccacatttgtagaggttttacttgctttaaaaaacctcccacacctccccctgaacctgaaacataaaatgaatgcaattgttgttgttctagcttggccactccctctctgcgcgctcgctcgctcactgaggccgggcgaccaaaggtcgcccgacgcccgggctttgcccgggcggcctcagtgagcgagcgagcgcgcagagagggagtggccaactccatcactaggggttcctctcgaggagcttggcccattgcatacgttgtatccatatcataatatgtacatttatattggctcatgtccaacattaccgccatgttactagtgtcgacaggctcagaggcacacaggagtttctgggctcaccctgcccccttccaacccctcagttcccatcctccagcagctgtttgtgtgctgcctctgaagtccacactgaacaaacttcagcctactcatgtccctaaaatgggcaaacattgcaagcagcaaacagcaaacacacagccctccctgcctgctgaccttggagctggggcagaggtcagagacctctctgggcccatgccacctccaacatccactcgaccccttggaatttcggtggagaggagcagaggttgtcctggcgtggtttaggtagtgtgagaggggtcgacgatcttgctaccagtggaacagccactaaggattctgcagtgagagcagagggccagctaagtggtactctcccagagactgtctgactcacgccaccccctccaccttggacacaggacgctgtggtttctgagccaggtacaatgactcctttcggtaagtgcagtggaagctgtacactgcccaggcaaagcgtccgggcagcgtaggcgggcgactcagatcccagccagtggacttagcccctgtttgctcctccgataactggggtgaccttggttaatattcaccagcagcctcccccgttgcccctctggatccactgcttaaatacggacgaggacagggccctgtctcctcagcttcaggcaccaccactgacctgggacagtgaatcgtaagtatgcctttcactgcgagaggttctggagaggcttctgagctccccatggcccaggcaggcagcaggtctggggcaggaggggggttgtggagtgggtatccgcctgctgaggtgcagggcagatcatcatgtgccttgactcggggcctggcccccccatctctgtcttgcaggacaattgccgtcttctgtctcgtggggcatcctcctgctggcaggcctgtgctgcctggtccctgtctccctggctgaggaccgggtaccgccaccatgagcacagctgtgttggagaacccaggcctgggcaggaagctgtctgactttggccaggaaaccagctacattgaagataactgcaaccagaatggggccatcagcctgatcttcagcctgaaggaagaggtgggagccctggccaaagtgctgagactgtttgaagagaatgatgtgaacctgacccacatagaaagcaggcctagcagactgaaaaaggatgagtatgagttcttcacccacctggacaaaagaagcctgcctgccctgaccaacatcatcaagatcctgagacatgacataggagccacagtgcatgagctgagcagagacaagaagaaggacacagtgccttggttccccaggaccatccaggagctggacagatttgccaaccagatcctgagctatggtgctgaacttgatgctgaccaccctggcttcaaggaccctgtgtacagggccagaagaaaacagtttgctgacatagcctacaactacagacacggccaacccatccccagagtggagtacatggaagaagagaaaaagacctggggcacagtgttcaagacactgaaaagcctgtacaagacccatgcctgctatgaatacaaccacatcttccctctactggaaaagtactgtggcttccacgaagataacatcccccagctggaagatgtgtcccagttcctgcagacctgcacaggcttcagactgcggccagttgctggcctgctgagcagcagagacttcctggggggcttggccttcagagtgttccactgcacccagtacatcagacacggcagcaagcccatgtacacccctgaaccagacatctgtcacgaactgctgggccatgtgcctctgttctctgacagaagctttgcccagttctcccaggagattggccttgccagccttggagcccctgatgaatacattgagaagctagccaccatctactggttcacagtggaatttggcctgtgtaagcagggagatagcatcaaggcctatggagctggcctgctgagcagctttggagagctgcaatactgcctgtctgagaagcctaaactgctccccctggaactggagaagacagccatccagaactacacagtgactgaattccagcccctgtactatgtggctgaatccttcaatgatgccaaggaaaaggtgagaaactttgctgccaccatcccaagaccattctctgtgaggtatgacccctacacccagagaattgaggtcctggacaacacccagcaattaaagatcctggcagactcaatcaactctgagattggcatcctgtgctctgccctgcagaaaatcaaatgaagatctgcctcgactgtgccttctagttgccagccatctgttgtttgcccctcccccgtgccttccttgaccctggaaggtgccactcccactgtcctttcctaataaaatgaggaaattgcatcgcattgtctgagtaggtgtcattctattctggggggtggggtggggcaggacagcaagggggaggattgggaagacaatagcaggcatgctggggatgcggtgggctctatggggcgcgccgtacccattgccaagttctgacaactgtctgtctatagccaattatgcatttcttaaattagaacccccccaatatacccaaatatatatatatgtgtgcatatatatagtaagttgtaacaaagttgtgaattcatacctgaagtatctcaagtgatgcaagttttatgaatttttgtttatgccttttgggaagagttgtattgacaaattttttatgcttaaagtaaaccataaatcaaaaaaataaaatctaggatgcaataaaacaaaacaacttcttgacataagtatggtatgtaaatctgttttgattggaaatcaatttgttatattgccagaattcctgttttagaatacatctctgctgatctgtctgtattcttagactgcatatctgggatgaactctgggcagaattcacatgggcttcctttgaaataaacaagacttttcaaattcttagtcgatctgcagaacctgtagccaggcactgaaccattttgatagatgcagtaatcgttgcaagtgtatatttcaaggagttctggctgggtcctagtttatgcttgtggcagaagcagtgagtaactgggaggaagttggtgagtaagcttcaaggaagaagtcatttttagtactctggatcttcctgattttaaagcactacaaaatggtgcattttcattcttgtcaagtgataacagatatattctgatgagcctgaaatgaatatatattgtatcatttttataatatctagcaaggtttgtattttcctagaacttgaactaaatttcagttcataaaatttataaaatacttagttgttgtaaaatatttttggaatgttcacataggtgacacacaaatgtcccattttcattctttctatagtaaatatgttctgatatgtgaaggtttagcagatgcatcagcatttaatcctagaggatctggcataatcttttcccccaagaatagaaattttttctgcttatgaaagtagtacatgtttctttaaaaacaaatcaatattgacttctgcctgctgtatagcactatgcctccacctggccatgaccaggggcatgtcctggtccacctacctgaaaatgtttgcaaccagcctcctggccatgtgcacaggggctgaagttgtcccacaggtattacgggccaacctgacaatacatgaagttccaccaaagtctgagaactcagaactgagctttggggactgaaagacagcacaaacctcaaatttctcagcactggaaacctcaaaatataactgaattccataaataagattttaagtcttaaatatgtatttttaaatgtattaaaagtcaagctgcttgtatttaagcacctaatacaatgcttaggttgtaaaaggagatgctcaataggtactaactgatatattgagatttaattatggtttgaccaatatttattggaaaccgccaaagcttaaatcatcagcttcttgaatgtgatttgaaaggtaatttagtattgaatagcatgtgagctagagtatttcattctttctggtttatttcttcaaatagactttgaatataatggtgaatgggtattataaattaactaataaaaatgacattgaaaatgaaaaaatatatatattaaagtgtagaaagtgaccaggcaccggtggatcccctaactacaaggaacccctagtgatggagttggccactccctctctgcgcgctcgctcgctcactgaggccgggcgaccaaaggtcgcccgacgcccgggctttgcccgggcggcctcagtgagcgagcgagcgcgcagagagggagtggccaacaggaagctcctctgtgtcctcataaaccctaacctcctctacttgagaggacattccaatcataggctgcccatccaccctctgtgtcctcctgttaattaggtcacttaacaaaaaggaaattgggtaggggtttttcacagaccgctttctaagggtaattttaaaatatctgggaagtcccttccactgctgtgttccagaagtgttggtaaacagcccacaaatgtcaacagcagaaacatacaagctgtcagctttgcacaagggcccaatctctggaagatccgcgcgtaccgagttctaattcactggccgtcgttttacaacgtcgtgactgggaaaaccctggcgttacccaacttaatcgccttgcagcacatccccctttcgccagctggcgtaatagcgaagaggcccgcaccgatcgcccttcccaacagttgcgcagcctgaatggcgaatggcgcctgatgcggtattttctccttacgcatctgtgcggtatttcacaccgcatatggtgcactctcagtacaatctgctctgatgccgcatagttaagccagccccgacacccgccaacacccgctgacgcgccctgacgggcttgtctgctcccggcatccgcttacagacaagctgtgaccgtctccgggagctgcatgtgtcagaggttttcaccgtcatcaccgaaacgcgcgagacgaaagggcctcgtgatacgcctatttttataggttaatgtcatgataataatggtttcttagacgtcaggtggcacttttcggggaaatgtgcgcggaacccccatttgtttatttttctaaatacattcaaatatgtatccgctcatgagacaataaccctgataaatgcttcaataatattgaaaaaggaagagtatgagccatattcaacgggaaacgtcttgctctaggccgcgattaaattccaacatggatgctgatttatatgggtataaatgggctcgcgataatgtcgggcaatcaggtgcgacaatctatcgattgtatgggaagcccgatgcgccagagttgtttctgaaacatggcaaaggtagcgttgccaatgatgttacagatgagatggtcagactaaactggctgacggaatttatgcctcttccgaccatcaagcattttatccgtactcctgatgatgcatggttactcaccactgcgatccctgggaaaacagcattccaggtattagaagaatatcctgattcaggtgaaaatattgttgatgcgctggcagtgttcctgcgccggttgcattcgattcctgtttgtaattgtccttttaacagcgatcgcgtatttcgtctcgctcaggcgcaatcacgaatgaataacggtttggttgatgcgagtgattttgatgacgagcgtaatggctggcctgttgaacaagtctggaaagaaatgcataaacttttgccattctcaccggattcagtcgtcactcatggtgatttctcacttgataaccttatttttgacgaggggaaattaataggttgtattgatgttggacgagtcggaatcgcagaccgataccaggatcttgccatcctatggaactgcctcggtgagttttctccttcattacagaaacggctttttcaaaaatatggtattgataatcctgatatgaataaattgcagtttcatttgatgctcgatgagtttttctaaaagcttgtgcaatgccacaaagaagagtcaatcgcagacaacattttgaatgcggtcacacgttagcagcatgattgccacggatggcaacatattaacggcatgatattgacttattgaataaaattgggtaaatttgactcaacgatgggttaattcgctcgttgtggtagtgagatgaaaagaggcggcgcttactaccgattccgcctagttggtcacttcgacgtatcgtctggaactccaaccatcgcaggcagagaggtctgcaaaatgcaatcccgaaacagttcgcaggtaatagttagagcctgcataacggtttcgggattttttatatctgcacaacaggtaagagcattgagtcgataatcgtgaagagtcggcgagcctggttagccagtgctctttccgttgtgctgaattaagcgaataccggaagcagaaccggatcaccaaatgcgtacaggcgtcatcgccgcccagcaacagcacaacccaaactgagccgtagccactgtctgtcctgaattcattagtaatagttacgctgcggccttttacacatgaccttcgtgaaagcgggtggcaggaggtcgcgctaacaacctcctgccgttttgcccgtgcatatcggtcacgaacaaatctgattactaaacacagtagcctggatttgttctatcagtaatcgaccttattcctaattaaatagagcaaatccccttattgggggtaagacatgaagatgccagaaaaacatgacctgttggccgccattctcgcggcaaaggaacaaggcatcggggcaatccttgcgtttgcaatggcgtaccttcgcggcagatataatggcggtgcgtttacaaaaacagtaatcgacgcaacgatgtgcgccattatcgcctggttcattcgtgaccttctcgacttcgccggactaagtagcaatctcgcttatataacgagcgtgtttatcggctacatcggtactgactcgattggttcgcttatcaaacgcttcgctgctaaaaaagccggagtagaagatggtagaaatcaataatcaacgtaaggcgttcctcgatatgctggcgtggtcggagggaactgataacggacgtcagaaaaccagaaatcatggttatgacgtcattgtaggcggagagctatttactgattactccgatcaccctcgcaaacttgtcacgctaaacccaaaactcaaatcaacaggcgccggacgctaccagcttctttcccgttggtgggatgcctaccgcaagcagcttggcctgaaagacttctctccgaaaagtcaggacgctgtggcattgcagcagattaaggagcgtggcgctttacctatgattgatcgtggtgatatccgtcaggcaatcgaccgttgcagcaatatctgggcttcactgccgggcgctggttatggtcagttcgagcataaggctgacagcctgattgcaaaattcaaagaagcgggcggaacggtcagagagattgatgtatgagcagagtcaccgcgattatctccgctctggttatctgcatcatcgtctgcctgtcatgggctgttaatcattaccgtgataacgccattacctacaaagcccagcgcgacaaaaatgccagagaactgaagctggcgaacgcggcaattactgacatgcagatgcgtcagcgtgatgttgctgcgctcgatgcaaaatacacgaaggagttagctgatgctaaagctgaaaatgatgctctgcgtgatgatgttgccgctggtcgtcgtcggttgcacatcaaagcagtctgtcagtcagtgcgtgaagccaccaccgcctccggcgtggataatgcagcctccccccgactggcagacaccgctgaacgggattatttcaccctcagagagaggctgatcactatgcaaaaacaactggaaggaacccagaagtatattaatgagcagtgcagatagagttgcccatatcgatgggcaactcatgcaattattgtgagcaatacacacgcgcttccagcggagtataaatgcctaaagtaataaaaccgagcaatccatttacgaatgtttgctgggtttctgttttaacaacattttctgcgccgccacaaattttggctgcatcgacagttttcttctgcccaattccagaaacgaagaaatgatgggtgatggtttcctttggtgctactgctgccggtttgttttgaacagtaaacgtctgttgagcacatcctgtaataagcagggccagcgcagtagcgagtagcatttttttcatggtgttattcccgatgctttttgaagttcgcagaatcgtatgtgtagaaaattaaacaaaccctaaacaatgagttgaaatttcatattgttaatatttattaatgtatgtcaggtgcgatgaatcgtcattgtattcccggattaactatgtccacagccctgacggggaacttctctgcgggagtgtccgggaataattaaaacgatgcacacagggtttagcgcgtacacgtattgcattatgccaacgccccggtgctgacacggaagaaaccggacgttatgatttagcgtggaaagatttgtgtagtgttctgaatgctctcagtaaatagtaatgaattatcaaaggtatagtaatatcttttatgttcatggatatttgtaacccatcggaaaactcctgctttagcaagattttccctgtattgctgaaatgtgatttctcttgatttcaacctatcataggacgtttctataagatgcgtgtttcttgagaatttaacatttacaacctttttaagtccttttattaacacggtgttatcgttttctaacacgatgtgaatattatctgtggctagatagtaaatataatgtgagacgttgtgacgtttgctagcctgtcagaccaagtttactcatatatactttagattgatttaaaacttcatttttaatttaaaaggatctaggtgaagatcctttttgataatctcatgaccaaaatcccttaacgtgagttttcgttccactgagcgtcagaccccgtagaaaagatcaaaggatcttcttgagatcctttttttctgcgcgtaatctgctgcttgcaaacaaaaaaaccaccgctaccagcggtggtttgtttgccggatcaagagctaccaactctttttccgaaggtaactggcttcagcagagcgcagataccaaatactgttcttctagtgtagccgtagttaggccaccacttcaagaactctgtagcaccgcctacatacctcgctctgctaatcctgttaccagtggctgctgccagtggcgataagtcgtgtcttaccgggttggactcaagacgatagttaccggataaggcgcagcggtcgggctgaacggggggttcgtgcacacagcccagcttggagcgaacgacctacaccgaactgagatacctacagcgtgagctatgagaaagcgccacgcttcccgaagggagaaaggcggacaggtatccggtaagcggcagggtcggaacaggagagcgcacgagggagcttccagggggaaacgcctggtatctttatagtcctgtcgggtttcgccacctctgacttgagcgtcgatttttgtgatgctcgtcaggggggcggagcctatggaaaaacgccagcaacgcggcctttttacggttcctggccttttgctggccttttgctcacatgttctttcctgcgttatcccctgattctgtggataaccgtattaccgcctttgagtgagctgataccgctcgccgcagccgaacgaccgagcgcagcgagtcagtgagcgaggaagcggaagagcgcccaatacgcaaaccgcctctccccgcgcgttggccgattcattaatgcagctggcacgacaggtttcccgactggaaagcgggcagtgagcgcaacgcaattaatgtgagttagctcactcattaggcaccccaggctttacactttatgcttccggctcgtatgttgtgtggaattgtgagcggataacaatttcacacaggaaacagctatgaccatgattacgccaagtttgcacgcctgccgttcgacgatttcgcgagttggttcagctgctgcctgaggctggacgacctcgcggagttctaccggcagtgcaaatccgtcggcatccaggaaaccagcagcggctatccgcgcatccatgcccccgaactgcaggagtggggaggcacgatggccgctttggtccggatctttgtgaaggaaccttacttctgtggtgtgacataattggacaaactacctacagagatttaaagctctaaggtaaatataaaatttttaagtgtataatgtgttaaactactgattctaattgtttgtgtattttagattccaacctatggaactgatgaatgggagcagtggtggaatgcctttaatgaggaaaacctgttttgctcagaagaaatgccatctagtgatgatgaggctactgctgactctcaacattctactcctccaaaaaagaagagaaaggtagaagaccccaaggactttccttcagaattgctaagttttttgagtcatgctgtgtttagtaatagaactcttgcttgctttgctatttacaccacaaaggaaaaagctgcactgctatacaagaaaattatggaaaaatattctgtaacctttataagtaggcataacagttataatcataacatactgttttttcttactccacacaggcatagagtgt

SEQ ID NO: 63 - DNA, 11432 bp, synthetic construct
  source 1..11432: mol_type = other DNA
ctgctattaataactatgctcaaaaattgtgtacctttagctttttaatttgtaaaggggttaataaggaatatttgatgtatagtgccttgactagagatcataatcagccataccacatttgtagaggttttacttgctttaaaaaacctcccacacctccccctgaacctgaaacataaaatgaatgcaattgttgttgttctagcttggccactccctctctgcgcgctcgctcgctcactgaggccgggcgaccaaaggtcgcccgacgcccgggctttgcccgggcggcctcagtgagcgagcgagcgcgcagagagggagtggccaactccatcactaggggttcctctcgaggagcttggcccattgcatacgttgtatccatatcataatatgtacatttatattggctcatgtccaacattaccgccatgttactagtgtcgacaggctcagaggcacacaggagtttctgggctcaccctgcccccttccaacccctcagttcccatcctccagcagctgtttgtgtgctgcctctgaagtccacactgaacaaacttcagcctactcatgtccctaaaatgggcaaacattgcaagcagcaaacagcaaacacacagccctccctgcctgctgaccttggagctggggcagaggtcagagacctctctgggcccatgccacctccaacatccactcgaccccttggaatttcggtggagaggagcagaggttgtcctggcgtggtttaggtagtgtgagaggggtcgacgatcttgctaccagtggaacagccactaaggattctgcagtgagagcagagggccagctaagtggtactctcccagagactgtctgactcacgccaccccctccaccttggacacaggacgctgtggtttctgagccaggtacaatgactcctttcggtaagtgcagtggaagctgtacactgcccaggcaaagcgtccgggcagcgtaggcgggcgactcagatcccagccagtggacttagcccctgtttgctcctccgataactggggtgaccttggttaatattcaccagcagcctcccccgttgcccctctggatccactgcttaaatacggacgaggacagggccctgtctcctcagcttcaggcaccaccactgacctgggacagtgaatcgtaagtatgcctttcactgcgagaggttctggagaggcttctgagctccccatggcccaggcaggcagcaggtctggggcaggaggggggttgtggagtgggtatccgcctgctgaggtgcagggcagatcatcatgtgccttgactcggggcctggcccccccatctctgtcttgcaggacaattgccgtcttctgtctcgtggggcatcctcctgctggcaggcctgtgctgcctggtccctgtctccctggctgaggaccgggtaccgccaccatgtccacagctgtgctggaaaaccctggcctgggcagaaagctgagtgactttggccaagagacctcttacattgaggacaactgcaaccagaatggagccatctccctgatcttcagcctgaaggaggaagtgggagccctggccaaagtcctgaggctgtttgaagagaatgatgtgaacctgacccacattgagtccaggcccagcagactgaagaaggatgaatatgagttcttcacccacctggacaagagaagcctgccagccctgaccaacatcatcaagatcctgagacatgacattggagccacagtgcatgagctgagcagagacaagaaaaaggacacagtgccctggttcccaagaaccatccaggagctggacagatttgccaaccaaatcctgagctatggtgcagaactggatgctgaccaccctggcttcaaggacccagtgtacagagccagaagaaagcaatttgctgacatagcctacaattacaggcacggccagcctatccctagagtggaatacatggaggaggaaaagaagacctggggcacagtgttcaaaaccctgaagagcctgtacaaaacccacgcctgctatgagtacaaccacatcttccctctgctggagaagtactgtggcttccatgaggacaacatccctcagctggaagatgtgagccagttcctgcagacatgcacaggcttcagactgagacctgttgctggcctgctgagcagcagagacttcctggggggcctggccttcagagtcttccactgtacccagtacatcagacacggcagcaaacccatgtacacccctgagcctgacatctgccacgagctgctgggccatgtgcccctgttctctgacagaagctttgcccagttcagccaagaaataggcctggccagcctgggagcccctgatgagtacattgaaaagctggccaccatctactggttcacagtggagtttggcctgtgcaagcagggggacagcatcaaggcctatggagctggcctgctgagcagctttggagaactgcagtactgcctgtctgagaagcctaagctgctgcctctggaactggagaagactgccatccagaattacactgtgacagaattccagcccctgtactatgttgcagagagcttcaatgatgccaaggaaaaggtgaggaactttgctgccaccatccctaggcccttctctgtgagatatgacccttacacccagagaattgaggtgctggacaacacccagcagcttaagatcctggctgatagcatcaactctgagattggcatcctgtgctctgccctgcagaagatcaaatgaagatctgcctcgactgtgccttctagttgccagccatctgttgtttgcccctcccccgtgccttccttgaccctggaaggtgccactcccactgtcctttcctaataaaatgaggaaattgcatcgcattgtctgagtaggtgtcattctattctggggggtggggtggggcaggacagcaagggggaggattgggaagacaatagcaggcatgctggggatgcggtgggctctatggggcgcgccgtacccattgccaagttctgacaactgtctgtctatagccaattatgcatttcttaaattagaacccccccaatatacccaaatatatatatatgtgtgcatatatatagtaagttgtaacaaagttgtgaattcatacctgaagtatctcaagtgatgcaagttttatgaatttttgtttatgccttttgggaagagttgtattgacaaattttttatgcttaaagtaaaccataaatcaaaaaaataaaatctaggatgcaataaaacaaaacaacttcttgacataagtatggtatgtaaatctgttttgattggaaatcaatttgttatattgccagaattcctgttttagaatacatctctgctgatctgtctgtattcttagactgcatatctgggatgaactctgggcagaattcacatgggcttcctttgaaataaacaagacttttcaaattcttagtcgatctgcagaacctgtagccaggcactgaaccattttgatagatgcagtaatcgttgcaagtgtatatttcaaggagttctggctgggtcctagtttatgcttgtggcagaagcagtgagtaactgggaggaagttggtgagtaagcttcaaggaagaagtcatttttagtactctggatcttcctgattttaaagcactacaaaatggtgcattttcattcttgtcaagtgataacagatatattctgatgagcctgaaatgaatatatattgtatcatttttataatatctagcaaggtttgtattttcctagaacttgaactaaatttcagttcataaaatttataaaatacttagttgttgtaaaatatttttggaatgttcacataggtgacacacaaatgtcccattttcattctttctatagtaaatatgttctgatatgtgaaggtttagcagatgcatcagcatttaatcctagaggatctggcataatcttttcccccaagaatagaaattttttctgcttatgaaagtagtacatgtttctttaaaaacaaatcaatattgacttctgcctgctgtatagcactatgcctccacctggccatgaccaggggcatgtcctggtccacctacctgaaaatgtttgcaaccagcctcctggccatgtgcacaggggctgaagttgtcccacaggtattacgggccaacctgacaatacatgaagttccaccaaagtctgagaactcagaactgagctttggggactgaaagacagcacaaacctcaaatttctcagcactggaaacctcaaaatataactgaattccataaataagattttaagtcttaaatatgtatttttaaatgtattaaaagtcaagctgcttgtatttaagcacctaatacaatgcttaggttgtaaaaggagatgctcaataggtactaactgatatattgagatttaattatggtttgaccaatatttattggaaaccgccaaagcttaaatcatcagcttcttgaatgtgatttgaaaggtaatttagtattgaatagcatgtgagctagagtatttcattctttctggtttatttcttcaaatagactttgaatataatggtgaatgggtattataaattaactaataaaaatgacattgaaaatgaaaaaatatatatattaaagtgtagaaagtgaccaggcaccggtggatcccctaactacaaggaacccctagtgatggagttggccactccctctctgcgcgctcgctcgctcactgaggccgggcgaccaaaggtcgcccgacgcccgggctttgcccgggcggcctcagtgagcgagcgagcgcgcagagagggagtggccaacaggaagctcctctgtgtcctcataaaccctaacctcctctacttgagaggacattccaatcataggctgcccatccaccctctgtgtcctcctgttaattaggtcacttaacaaaaaggaaattgggtaggggtttttcacagaccgctttctaagggtaattttaaaatatctgggaagtcccttccactgctgtgttccagaagtgttggtaaacagcccacaaatgtcaacagcagaaacatacaagctgtcagctttgcacaagggcccaatctctggaagatccgcgcgtaccgagttctaattcactggccgtcgttttacaacgtcgtgactgggaaaaccctggcgttacccaacttaatcgccttgcagcacatccccctttcgccagctggcgtaatagcgaagaggcccgcaccgatcgcccttcccaacagttgcgcagcctgaatggcgaatggcgcctgatgcggtattttctccttacgcatctgtgcggtatttcacaccgcatatggtgcactctcagtacaatctgctctgatgccgcatagttaagccagccccgacacccgccaacacccgctgacgcgccctgacgggcttgtctgctcccggcatccgcttacagacaagctgtgaccgtctccgggagctgcatgtgtcagaggttttcaccgtcatcaccgaaacgcgcgagacgaaagggcctcgtgatacgcctatttttataggttaatgtcatgataataatggtttcttagacgtcaggtggcacttttcggggaaatgtgcgcggaacccccatttgtttatttttctaaatacattcaaatatgtatccgctcatgagacaataaccctgataaatgcttcaataatattgaaaaaggaagagtatgagccatattcaacgggaaacgtcttgctctaggccgcgattaaattccaacatggatgctgatttatatgggtataaatgggctcgcgataatgtcgggcaatcaggtgcgacaatctatcgattgtatgggaagcccgatgcgccagagttgtttctgaaacatggcaaaggtagcgttgccaatgatgttacagatgagatggtcagactaaactggctgacggaatttatgcctcttccgaccatcaagcattttatccgtactcctgatgatgcatggttactcaccactgcgatccctgggaaaacagcattccaggtattagaagaatatcctgattcaggtgaaaatattgttgatgcgctggcagtgttcctgcgccggttgcattcgattcctgtttgtaattgtccttttaacagcgatcgcgtatttcgtctcgctcaggcgcaatcacgaatgaataacggtttggttgatgcgagtgattttgatgacgagcgtaatggctggcctgttgaacaagtctggaaagaaatgcataaacttttgccattctcaccggattcagtcgtcactcatggtgatttctcacttgataaccttatttttgacgaggggaaattaataggttgtattgatgttggacgagtcggaatcgcagaccgataccaggatcttgccatcctatggaactgcctcggtgagttttctccttcattacagaaacggctttttcaaaaatatggtattgataatcctgatatgaataaattgcagtttcatttgatgctcgatgagtttttctaaaagcttgtgcaatgccacaaagaagagtcaatcgcagacaacattttgaatgcggtcacacgttagcagcatgattgccacggatggcaacatattaacggcatgatattgacttattgaataaaattgggtaaatttgactcaacgatgggttaattcgctcgttgtggtagtgagatgaaaagaggcggcgcttactaccgattccgcctagttggtcacttcgacgtatcgtctggaactccaaccatcgcaggcagagaggtctgcaaaatgcaatcccgaaacagttcgcaggtaatagttagagcctgcataacggtttcgggattttttatatctgcacaacaggtaagagcattgagtcgataatcgtgaagagtcggcgagcctggttagccagtgctctttccgttgtgctgaattaagcgaataccggaagcagaaccggatcaccaaatgcgtacaggcgtcatcgccgcccagcaacagcacaacccaaactgagccgtagccactgtctgtcctgaattcattagtaatagttacgctgcggccttttacacatgaccttcgtgaaagcgggtggcaggaggtcgcgctaacaacctcctgccgttttgcccgtgcatatcggtcacgaacaaatctgattactaaacacagtagcctggatttgttctatcagtaatcgaccttattcctaattaaatagagcaaatccccttattgggggtaagacatgaagatgccagaaaaacatgacctgttggccgccattctcgcggcaaaggaacaaggcatcggggcaatccttgcgtttgcaatggcgtaccttcgcggcagatataatggcggtgcgtttacaaaaacagtaatcgacgcaacgatgtgcgccattatcgcctggttcattcgtgaccttctcgacttcgccggactaagtagcaatctcgcttatataacgagcgtgtttatcggctacatcggtactgactcgattggttcgcttatcaaacgcttcgctgctaaaaaagccggagtagaagatggtagaaatcaataatcaacgtaaggcgttcctcgatatgctggcgtggtcggagggaactgataacggacgtcagaaaaccagaaatcatggttatgacgtcattgtaggcggagagctatttactgattactccgatcaccctcgcaaacttgtcacgctaaacccaaaactcaaatcaacaggcgccggacgctaccagcttctttcccgttggtgggatgcctaccgcaagcagcttggcctgaaagacttctctccgaaaagtcaggacgctgtggcattgcagcagattaaggagcgtggcgctttacctatgattgatcgtggtgatatccgtcaggcaatcgaccgttgcagcaatatctgggcttcactgccgggcgctggttatggtcagttcgagcataaggctgacagcctgattgcaaaattcaaagaagcgggcggaacggtcagagagattgatgtatgagcagagtcaccgcgattatctccgctctggttatctgcatcatcgtctgcctgtcatgggctgttaatcattaccgtgataacgccattacctacaaagcccagcgcgacaaaaatgccagagaactgaagctggcgaacgcggcaattactgacatgcagatgcgtcagcgtgatgttgctgcgctcgatgcaaaatacacgaaggagttagctgatgctaaagctgaaaatgatgctctgcgtgatgatgttgccgctggtcgtcgtcggttgcacatcaaagcagtctgtcagtcagtgcgtgaagccaccaccgcctccggcgtggataatgcagcctccccccgactggcagacaccgctgaacgggattatttcaccctcagagagaggctgatcactatgcaaaaacaactggaaggaacccagaagtatattaatgagcagtgcagatagagttgcccatatcgatgggcaactcatgcaattattgtgagcaatacacacgcgcttccagcggagtataaatgcctaaagtaataaaaccgagcaatccatttacgaatgtttgctgggtttctgttttaacaacattttctgcgccgccacaaattttggctgcatcgacagttttcttctgcccaattccagaaacgaagaaatgatgggtgatggtttcctttggtgctactgctgccggtttgttttgaacagtaaacgtctgttgagcacatcctgtaataagcagggccagcgcagtagcgagtagcatttttttcatggtgttattcccgatgctttttgaagttcgcagaatcgtatgtgtagaaaattaaacaaaccctaaacaatgagttgaaatttcatattgttaatatttattaatgtatgtcaggtgcgatgaatcgtcattgtattcccggattaactatgtccacagccctgacggggaacttctctgcgggagtgtccgggaataattaaaacgatgcacacagggtttagcgcgtacacgtattgcattatgccaacgccccggtgctgacacggaagaaaccggacgttatgatttagcgtggaaagatttgtgtagtgttctgaatgctctcagtaaatagtaatgaattatcaaaggtatagtaatatcttttatgttcatggatatttgtaacccatcggaaaactcctgctttagcaagattttccctgtattgctgaaatgtgatttctcttgatttcaacctatcataggacgtttctataagatgcgtgtttcttgagaatttaacatttacaacctttttaagtccttttattaacacggtgttatcgttttctaacacgatgtgaatattatctgtggctagatagtaaatataatgtgagacgttgtgacgtttgctagcctgtcagaccaagtttactcatatatactttagattgatttaaaacttcatttttaatttaaaaggatctaggtgaagatcctttttgataatctcatgaccaaaatcccttaacgtgagttttcgttccactgagcgtcagaccccgtagaaaagatcaaaggatcttcttgagatcctttttttctgcgcgtaatctgctgcttgcaaacaaaaaaaccaccgctaccagcggtggtttgtttgccggatcaagagctaccaactctttttccgaaggtaactggcttcagcagagcgcagataccaaatactgttcttctagtgtagccgtagttaggccaccacttcaagaactctgtagcaccgcctacatacctcgctctgctaatcctgttaccagtggctgctgccagtggcgataagtcgtgtcttaccgggttggactcaagacgatagttaccggataaggcgcagcggtcgggctgaacggggggttcgtgcacacagcccagcttggagcgaacgacctacaccgaactgagatacctacagcgtgagctatgagaaagcgccacgcttcccgaagggagaaaggcggacaggtatccggtaagcggcagggtcggaacaggagagcgcacgagggagcttccagggggaaacgcctggtatctttatagtcctgtcgggtttcgccacctctgacttgagcgtcgatttttgtgatgctcgtcaggggggcggagcctatggaaaaacgccagcaacgcggcctttttacggttcctggccttttgctggccttttgctcacatgttctttcctgcgttatcccctgattctgtggataaccgtattaccgcctttgagtgagctgataccgctcgccgcagccgaacgaccgagcgcagcgagtcagtgagcgaggaagcggaagagcgcccaatacgcaaaccgcctctccccgcgcgttggccgattcattaatgcagctggcacgacaggtttcccgactggaaagcgggcagtgagcgcaacgcaattaatgtgagttagctcactcattaggcaccccaggctttacactttatgcttccggctcgtatgttgtgtggaattgtgagcggataacaatttcacacaggaaacagctatgaccatgattacgccaagtttgcacgcctgccgttcgacgatttcgcgagttggttcagctgctgcctgaggctggacgacctcgcggagttctaccggcagtgcaaatccgtcggcatccaggaaaccagcagcggctatccgcgcatccatgcccccgaactgcaggagtggggaggcacgatggccgctttggtccggatctttgtgaaggaaccttacttctgtggtgtgacataattggacaaactacctacagagatttaaagctctaaggtaaatataaaatttttaagtgtataatgtgttaaactactgattctaattgtttgtgtattttagattccaacctatggaactgatgaatgggagcagtggtggaatgcctttaatgaggaaaacctgttttgctcagaagaaatgccatctagtgatgatgaggctactgctgactctcaacattctactcctccaaaaaagaagagaaaggtagaagaccccaaggactttccttcagaattgctaagttttttgagtcatgctgtgtttagtaatagaactcttgcttgctttgctatttacaccacaaaggaaaaagctgcactgctatacaagaaaattatggaaaaatattctgtaacctttataagtaggcataacagttataatcataacatactgttttttcttactccacacaggcatagagtgt

SEQ ID NO: 64 - DNA, 11432 bp, synthetic construct
  source 1..11432: mol_type = other DNA
ctgctattaataactatgctcaaaaattgtgtacctttagctttttaatttgtaaaggggttaataaggaatatttgatgtatagtgccttgactagagatcataatcagccataccacatttgtagaggttttacttgctttaaaaaacctcccacacctccccctgaacctgaaacataaaatgaatgcaattgttgttgttctagcttggccactccctctctgcgcgctcgctcgctcactgaggccgggcgaccaaaggtcgcccgacgcccgggctttgcccgggcggcctcagtgagcgagcgagcgcgcagagagggagtggccaactccatcactaggggttcctctcgaggagcttggcccattgcatacgttgtatccatatcataatatgtacatttatattggctcatgtccaacattaccgccatgttactagtgtcgacaggctcagaggcacacaggagtttctgggctcaccctgcccccttccaacccctcagttcccatcctccagcagctgtttgtgtgctgcctctgaagtccacactgaacaaacttcagcctactcatgtccctaaaatgggcaaacattgcaagcagcaaacagcaaacacacagccctccctgcctgctgaccttggagctggggcagaggtcagagacctctctgggcccatgccacctccaacatccactcgaccccttggaatttcggtggagaggagcagaggttgtcctggcgtggtttaggtagtgtgagaggggtcgacgatcttgctaccagtggaacagccactaaggattctgcagtgagagcagagggccagctaagtggtactctcccagagactgtctgactcacgccaccccctccaccttggacacaggacgctgtggtttctgagccaggtacaatgactcctttcggtaagtgcagtggaagctgtacactgcccaggcaaagcgtccgggcagcgtaggcgggcgactcagatcccagccagtggacttagcccctgtttgctcctccgataactggggtgaccttggttaatattcaccagcagcctcccccgttgcccctctggatccactgcttaaatacggacgaggacagggccctgtctcctcagcttcaggcaccaccactgacctgggacagtgaatcgtaagtatgcctttcactgcgagaggttctggagaggcttctgagctccccatggcccaggcaggcagcaggtctggggcaggaggggggttgtggagtgggtatccgcctgctgaggtgcagggcagatcatcatgtgccttgactcggggcctggcccccccatctctgtcttgcaggacaattgccgtcttctgtctcgtggggcatcctcctgctggcaggcctgtgctgcctggtccctgtctccctggctgaggaccgggtaccgccaccatgtccacagctgtgctggagaaccctggcctgggcagaaagctgagtgactttggccaggagaccagctacattgaggacaactgtaaccagaatggggccatcagcctgatcttcagcctgaaggaggaagtgggagcattggccaaggtgctgagactgtttgaagaaaatgatgtcaacctgacccacatagagagcagacctagcaggttaaagaaggatgagtatgaattcttcacccacctggacaaaagaagcctgccagccctgaccaacatcatcaagatcttgagacatgacattggtgccacagtgcatgagctgagcagagacaagaagaaggacacagtcccctggttccctagaaccatccaggagctggacagatttgccaaccagatcctcagctatggagctgagctggatgctgatcaccctggcttcaaggacccagtgtacagagccagaagaaagcagtttgctgacatagcctacaactacagacacggccagcccatccctagagttgagtacatggaggaggaaaaaaagacctggggcactgtgttcaagaccctcaagagcctgtacaagacccatgcctgttatgaatacaaccacatcttccccctgctggagaaatactgtggcttccatgaagacaacatccctcagctggaagatgtcagccagttcctgcagacctgcacaggcttcagactgagacctgtggctggcctgctgagctctagagacttcctgggaggcctggccttcagagtgttccactgcacccaatacatcagacatggcagcaagcccatgtacaccccagaacctgacatctgccacgagctgctgggccatgtgcccctgttctctgacaggagctttgcccaattctctcaggagataggcctggcctccctgggtgcccctgatgagtacattgaaaagctagccaccatctactggttcacagtggaatttggcctgtgcaaacagggagacagcatcaaggcctatggagctggcctgctgagctcatttggagaactgcagtactgcctgtctgagaagcctaagctgctgcccctggaactggagaaaacagccatccagaactacacagtgactgagttccagcccctgtactatgtggctgaaagcttcaatgatgccaaggagaaggtgagaaactttgctgccaccatccccaggcctttctctgtgagatatgacccttacacacaaagaattgaggtgctggacaatacccagcagctgaaaatcctggctgacagcatcaactctgagattggcatcctgtgctctgccctgcagaagatcaaatgaagatctgcctcgactgtgccttctagttgccagccatctgttgtttgcccctcccccgtgccttccttgaccctggaaggtgccactcccactgtcctttcctaataaaatgaggaaattgcatcgcattgtctgagtaggtgtcattctattctggggggtggggtggggcaggacagcaagggggaggattgggaagacaatagcaggcatgctggggatgcggtgggctctatggggcgcgccgtacccattgccaagttctgacaactgtctgtctatagccaattatgcatttcttaaattagaacccccccaatatacccaaatatatatatatgtgtgcatatatatagtaagttgtaacaaagttgtgaattcatacctgaagtatctcaagtgatgcaagttttatgaatttttgtttatgccttttgggaagagttgtattgacaaattttttatgcttaaagtaaaccataaatcaaaaaaataaaatctaggatgcaataaaacaaaacaacttcttgacataagtatggtatgtaaatctgttttgattggaaatcaatttgttatattgccagaattcctgttttagaatacatctctgctgatctgtctgtattcttagactgcatatctgggatgaactctgggcagaattcacatgggcttcctttgaaataaacaagacttttcaaattcttagtcgatctgcagaacctgtagccaggcactgaaccattttgatagatgcagtaatcgttgcaagtgtatatttcaaggagttctggctgggtcctagtttatgcttgtggcagaagcagtgagtaactgggaggaagttggtgagtaagcttcaaggaagaagtcatttttagtactctggatcttcctgattttaaagcactacaaaatggtgcattttcattcttgtcaagtgataacagatatattctgatgagcctgaaatgaatatatattgtatcatttttataatatctagcaaggtttgtattttcctagaacttgaactaaatttcagttcataaaatttataaaatacttagttgttgtaaaatatttttggaatgttcacataggtgacacacaaatgtcccattttcattctttctatagtaaatatgttctgatatgtgaaggtttagcagatgcatcagcatttaatcctagaggatctggcataatcttttcccccaagaatagaaattttttctgcttatgaaagtagtacatgtttctttaaaaacaaatcaatattgacttctgcctgctgtatagcactatgcctccacctggccatgaccaggggcatgtcctggtccacctacctgaaaatgtttgcaaccagcctcctggccatgtgcacaggggctgaagttgtcccacaggtattacgggccaacctgacaatacatgaagttccaccaaagtctgagaactcagaactgagctttggggactgaaagacagcacaaacctcaaatttctcagcactggaaacctcaaaatataactgaattccataaataagattttaagtcttaaatatgtatttttaaatgtattaaaagtcaagctgcttgtatttaagcacctaatacaatgcttaggttgtaaaaggagatgctcaataggtactaactgatatattgagatttaattatggtttgaccaatatttattggaaaccgccaaagcttaaatcatcagcttcttgaatgtgatttgaaaggtaatttagtattgaatagcatgtgagctagagtatttcattctttctggtttatttcttcaaatagactttgaatataatggtgaatgggtattataaattaactaataaaaatgacattgaaaatgaaaaaatatatatattaaagtgtagaaagtgaccaggcaccggtggatcccctaactacaaggaacccctagtgatggagttggccactccctctctgcgcgctcgctcgctcactgaggccgggcgaccaaaggtcgcccgacgcccgggctttgcccgggcggcctcagtgagcgagcgagcgcgcagagagggagtggccaacaggaagctcctctgtgtcctcataaaccctaacctcctctacttgagaggacattccaatcataggctgcccatccaccctctgtgtcctcctgttaattaggtcacttaacaaaaaggaaattgggtaggggtttttcacagaccgctttctaagggtaattttaaaatatctgggaagtcccttccactgctgtgttccagaagtgttggtaaacagcccacaaatgtcaacagcagaaacatacaagctgtcagctttgcacaagggcccaatctctggaagatccgcgcgtaccgagttctaattcactggccgtcgttttacaacgtcgtgactgggaaaaccctggcgttacccaacttaatcgccttgcagcacatccccctttcgccagctggcgtaatagcgaagaggcccgcaccgatcgcccttcccaacagttgcgcagcctgaatggcgaatggcgcctgatgcggtattttctccttacgcatctgtgcggtatttcacaccgcatatggtgcactctcagtacaatctgctctgatgccgcatagttaagccagccccgacacccgccaacacccgctgacgcgccctgacgggcttgtctgctcccggcatccgcttacagacaagctgtgaccgtctccgggagctgcatgtgtcagaggttttcaccgtcatcaccgaaacgcgcgagacgaaagggcctcgtgatacgcctatttttataggttaatgtcatgataataatggtttcttagacgtcaggtggcacttttcggggaaatgtgcgcggaacccccatttgtttatttttctaaatacattcaaatatgtatccgctcatgagacaataaccctgataaatgcttcaataatattgaaaaaggaagagtatgagccatattcaacgggaaacgtcttgctctaggccgcgattaaattccaacatggatgctgatttatatgggtataaatgggctcgcgataatgtcgggcaatcaggtgcgacaatctatcgattgtatgggaagcccgatgcgccagagttgtttctgaaacatggcaaaggtagcgttgccaatgatgttacagatgagatggtcagactaaactggctgacggaatttatgcctcttccgaccatcaagcattttatccgtactcctgatgatgcatggttactcaccactgcgatccctgggaaaacagcattccaggtattagaagaatatcctgattcaggtgaaaatattgttgatgcgctggcagtgttcctgcgccggttgcattcgattcctgtttgtaattgtccttttaacagcgatcgcgtatttcgtctcgctcaggcgcaatcacgaatgaataacggtttggttgatgcgagtgattttgatgacgagcgtaatggctggcctgttgaacaagtctggaaagaaatgcataaacttttgccattctcaccggattcagtcgtcactcatggtgatttctcacttgataaccttatttttgacgaggggaaattaataggttgtattgatgttggacgagtcggaatcgcagaccgataccaggatcttgccatcctatggaactgcctcggtgagttttctccttcattacagaaacggctttttcaaaaatatggtattgataatcctgatatgaataaattgcagtttcatttgatgctcgatgagtttttctaaaagcttgtgcaatgccacaaagaagagtcaatcgcagacaacattttgaatgcggtcacacgttagcagcatgattgccacggatggcaacatattaacggcatgatattgacttattgaataaaattgggtaaatttgactcaacgatgggttaattcgctcgttgtggtagtgagatgaaaagaggcggcgcttactaccgattccgcctagttggtcacttcgacgtatcgtctggaactccaaccatcgcaggcagagaggtctgcaaaatgcaatcccgaaacagttcgcaggtaatagttagagcctgcataacggtttcgggattttttatatctgcacaacaggtaagagcattgagtcgataatcgtgaagagtcggcgagcctggttagccagtgctctttccgttgtgctgaattaagcgaataccggaagcagaaccggatcaccaaatgcgtacaggcgtcatcgccgcccagcaacagcacaacccaaactgagccgtagccactgtctgtcctgaattcattagtaatagttacgctgcggccttttacacatgaccttcgtgaaagcgggtggcaggaggtcgcgctaacaacctcctgccgttttgcccgtgcatatcggtcacgaacaaatctgattactaaacacagtagcctggatttgttctatcagtaatcgaccttattcctaattaaatagagcaaatccccttattgggggtaagacatgaagatgccagaaaaacatgacctgttggccgccattctcgcggcaaaggaacaaggcatcggggcaatccttgcgtttgcaatggcgtaccttcgcggcagatataatggcggtgcgtttacaaaaacagtaatcgacgcaacgatgtgcgccattatcgcctggttcattcgtgaccttctcgacttcgccggactaagtagcaatctcgcttatataacgagcgtgtttatcggctacatcggtactgactcgattggttcgcttatcaaacgcttcgctgctaaaaaagccggagtagaagatggtagaaatcaataatcaacgtaaggcgttcctcgatatgctggcgtggtcggagggaactgataacggacgtcagaaaaccagaaatcatggttatgacgtcattgtaggcggagagctatttactgattactccgatcaccctcgcaaacttgtcacgctaaacccaaaactcaaatcaacaggcgccggacgctaccagcttctttcccgttggtgggatgcctaccgcaagcagcttggcctgaaagacttctctccgaaaagtcaggacgctgtggcattgcagcagattaaggagcgtggcgctttacctatgattgatcgtggtgatatccgtcaggcaatcgaccgttgcagcaatatctgggcttcactgccgggcgctggttatggtcagttcgagcataaggctgacagcctgattgcaaaattcaaagaagcgggcggaacggtcagagagattgatgtatgagcagagtcaccgcgattatctccgctctggttatctgcatcatcgtctgcctgtcatgggctgttaatcattaccgtgataacgccattacctacaaagcccagcgcgacaaaaatgccagagaactgaagctggcgaacgcggcaattactgacatgcagatgcgtcagcgtgatgttgctgcgctcgatgcaaaatacacgaaggagttagctgatgctaaagctgaaaatgatgctctgcgtgatgatgttgccgctggtcgtcgtcggttgcacatcaaagcagtctgtcagtcagtgcgtgaagccaccaccgcctccggcgtggataatgcagcctccccccgactggcagacaccgctgaacgggattatttcaccctcagagagaggctgatcactatgcaaaaacaactggaaggaacccagaagtatattaatgagcagtgcagatagagttgcccatatcgatgggcaactcatgcaattattgtgagcaatacacacgcgcttccagcggagtataaatgcctaaagtaataaaaccgagcaatccatttacgaatgtttgctgggtttctgttttaacaacattttctgcgccgccacaaattttggctgcatcgacagttttcttctgcccaattccagaaacgaagaaatgatgggtgatggtttcctttggtgctactgctgccggtttgttttgaacagtaaacgtctgttgagcacatcctgtaataagcagggccagcgcagtagcgagtagcatttttttcatggtgttattcccgatgctttttgaagttcgcagaatcgtatgtgtagaaaattaaacaaaccctaaacaatgagttgaaatttcatattgttaatatttattaatgtatgtcaggtgcgatgaatcgtcattgtattcccggattaactatgtccacagccctgacggggaacttctctgcgggagtgtccgggaataattaaaacgatgcacacagggtttagcgcgtacacgtattgcattatgccaacgccccggtgctgacacggaagaaaccggacgttatgatttagcgtggaaagatttgtgtagtgttctgaatgctctcagtaaatagtaatgaattatcaaaggtatagtaatatcttttatgttcatggatatttgtaacccatcggaaaactcctgctttagcaagattttccctgtattgctgaaatgtgatttctcttgatttcaacctatcataggacgtttctataagatgcgtgtttcttgagaatttaacatttacaacctttttaagtccttttattaacacggtgttatcgttttctaacacgatgtgaatattatctgtggctagatagtaaatataatgtgagacgttgtgacgtttgctagcctgtcagaccaagtttactcatatatactttagattgatttaaaacttcatttttaatttaaaaggatctaggtgaagatcctttttgataatctcatgaccaaaatcccttaacgtgagttttcgttccactgagcgtcagaccccgtagaaaagatcaaaggatcttcttgagatcctttttttctgcgcgtaatctgctgcttgcaaacaaaaaaaccaccgctaccagcggtggtttgtttgccggatcaagagctaccaactctttttccgaaggtaactggcttcagcagagcgcagataccaaatactgttcttctagtgtagccgtagttaggccaccacttcaagaactctgtagcaccgcctacatacctcgctctgctaatcctgttaccagtggctgctgccagtggcgataagtcgtgtcttaccgggttggactcaagacgatagttaccggataaggcgcagcggtcgggctgaacggggggttcgtgcacacagcccagcttggagcgaacgacctacaccgaactgagatacctacagcgtgagctatgagaaagcgccacgcttcccgaagggagaaaggcggacaggtatccggtaagcggcagggtcggaacaggagagcgcacgagggagcttccagggggaaacgcctggtatctttatagtcctgtcgggtttcgccacctctgacttgagcgtcgatttttgtgatgctcgtcaggggggcggagcctatggaaaaacgccagcaacgcggcctttttacggttcctggccttttgctggccttttgctcacatgttctttcctgcgttatcccctgattctgtggataaccgtattaccgcctttgagtgagctgataccgctcgccgcagccgaacgaccgagcgcagcgagtcagtgagcgaggaagcggaagagcgcccaatacgcaaaccgcctctccccgcgcgttggccgattcattaatgcagctggcacgacaggtttcccgactggaaagcgggcagtgagcgcaacgcaattaatgtgagttagctcactcattaggcaccccaggctttacactttatgcttccggctcgtatgttgtgtggaattgtgagcggataacaatttcacacaggaaacagctatgaccatgattacgccaagtttgcacgcctgccgttcgacgatttcgcgagttggttcagctgctgcctgaggctggacgacctcgcggagttctaccggcagtgcaaatccgtcggcatccaggaaaccagcagcggctatccgcgcatccatgcccccgaactgcaggagtggggaggcacgatggccgctttggtccggatctttgtgaaggaaccttacttctgtggtgtgacataattggacaaactacctacagagatttaaagctctaaggtaaatataaaatttttaagtgtataatgtgttaaactactgattctaattgtttgtgtattttagattccaacctatggaactgatgaatgggagcagtggtggaatgcctttaatgaggaaaacctgttttgctcagaagaaatgccatctagtgatgatgaggctactgctgactctcaacattctactcctccaaaaaagaagagaaaggtagaagaccccaaggactttccttcagaattgctaagttttttgagtcatgctgtgtttagtaatagaactcttgcttgctttgctatttacaccacaaaggaaaaagctgcactgctatacaagaaaattatggaaaaatattctgtaacctttataagtaggcataacagttataatcataacatactgttttttcttactccacacaggcatagagtgt

SEQ ID NO: 65 - DNA, 11432 bp, synthetic construct
  source 1..11432: mol_type = other DNA
ctgctattaataactatgctcaaaaattgtgtacctttagctttttaatttgtaaaggggttaataaggaatatttgatgtatagtgccttgactagagatcataatcagccataccacatttgtagaggttttacttgctttaaaaaacctcccacacctccccctgaacctgaaacataaaatgaatgcaattgttgttgttctagcttggccactccctctctgcgcgctcgctcgctcactgaggccgggcgaccaaaggtcgcccgacgcccgggctttgcccgggcggcctcagtgagcgagcgagcgcgcagagagggagtggccaactccatcactaggggttcctctcgaggagcttggcccattgcatacgttgtatccatatcataatatgtacatttatattggctcatgtccaacattaccgccatgttactagtgtcgacaggctcagaggcacacaggagtttctgggctcaccctgcccccttccaacccctcagttcccatcctccagcagctgtttgtgtgctgcctctgaagtccacactgaacaaacttcagcctactcatgtccctaaaatgggcaaacattgcaagcagcaaacagcaaacacacagccctccctgcctgctgaccttggagctggggcagaggtcagagacctctctgggcccatgccacctccaacatccactcgaccccttggaatttcggtggagaggagcagaggttgtcctggcgtggtttaggtagtgtgagaggggtcgacgatcttgctaccagtggaacagccactaaggattctgcagtgagagcagagggccagctaagtggtactctcccagagactgtctgactcacgccaccccctccaccttggacacaggacgctgtggtttctgagccaggtacaatgactcctttcggtaagtgcagtggaagctgtacactgcccaggcaaagcgtccgggcagcgtaggcgggcgactcagatcccagccagtggacttagcccctgtttgctcctccgataactggggtgaccttggttaatattcaccagcagcctcccccgttgcccctctggatccactgcttaaatacggacgaggacagggccctgtctcctcagcttcaggcaccaccactgacctgggacagtgaatcgtaagtatgcctttcactgcgagaggttctggagaggcttctgagctccccatggcccaggcaggcagcaggtctggggcaggaggggggttgtggagtgggtatccgcctgctgaggtgcagggcagatcatcatgtgccttgactcggggcctggcccccccatctctgtcttgcaggacaattgccgtcttctgtctcgtggggcatcctcctgctggcaggcctgtgctgcctggtccctgtctccctggctgaggaccgggtaccgccaccatgtccacagctgtgctggagaaccctggcctgggcagaaagctgagtgactttggccaggagaccagctacatagaagacaactgcaatcagaatggagccatcagcctcatcttcagcctgaaggaggaagtgggagccctggccaaagtgctgagactgtttgaggaaaatgatgtcaacctgacccacattgagagcagacccagcagactgaaaaaggatgagtatgagttcttcacccacctggacaagagaagcctgcctgccctcaccaacatcatcaaaatcctgagacatgacattggagccacagtgcatgaactgtccagagataaaaagaaagacacagtcccctggttccctaggaccatccaggagctggacagatttgccaaccagatcctgtcttatggagcagaactggatgctgaccaccctggcttcaaggaccctgtgtacagggccagaagaaagcagtttgctgacatagcctacaactacagacatggccaacccatccccagagttgaatacatggaggaggaaaagaagacctggggcacagtcttcaagaccctgaaaagcctgtacaagacccacgcctgctatgagtacaaccacatcttccccctgctggaaaagtactgtggcttccacgaggacaacatccctcagctggaggatgtgagccagttcctgcagacctgcacaggcttcagactcagacctgttgctggcctgctgagtagcagagacttcctgggaggcttggccttcagagtgttccactgcacccagtacatcagacacggcagcaagcccatgtacaccccagagcctgacatctgtcatgaactgttaggccatgtgcctctgttctctgaccggagctttgcccaattcagccaggaaattggcctggccagcctgggagccccagatgaatacattgagaagctggccacaatctactggttcacagtggaatttggcctgtgtaagcagggtgacagcatcaaagcctatggtgctggcctgctgagcagctttggagagctgcagtactgcctgtctgaaaagcctaaactgctgcctttggagctggagaagacagccatccagaactacacagtgactgagttccagcccctgtactatgtggctgagagcttcaatgatgccaaggagaaggtgaggaactttgctgccaccatccctagacctttctctgtgagatatgacccctacacccagaggattgaggtgctggacaacacacagcagctgaagatccttgctgacagcatcaactctgagattggcatcctgtgctctgccctgcaaaagatcaagtgaagatctgcctcgactgtgccttctagttgccagccatctgttgtttgcccctcccccgtgccttccttgaccctggaaggtgccactcccactgtcctttcctaataaaatgaggaaattgcatcgcattgtctgagtaggtgtcattctattctggggggtggggtggggcaggacagcaagggggaggattgggaagacaatagcaggcatgctggggatgcggtgggctctatggggcgcgccgtacccattgccaagttctgacaactgtctgtctatagccaattatgcatttcttaaattagaacccccccaatatacccaaatatatatatatgtgtgcatatatatagtaagttgtaacaaagttgtgaattcatacctgaagtatctcaagtgatgcaagttttatgaatttttgtttatgccttttgggaagagttgtattgacaaattttttatgcttaaagtaaaccataaatcaaaaaaataaaatctaggatgcaataaaacaaaacaacttcttgacataagtatggtatgtaaatctgttttgattggaaatcaatttgttatattgccagaattcctgttttagaatacatctctgctgatctgtctgtattcttagactgcatatctgggatgaactctgggcagaattcacatgggcttcctttgaaataaacaagacttttcaaattcttagtcgatctgcagaacctgtagccaggcactgaaccattttgatagatgcagtaatcgttgcaagtgtatatttcaaggagttctggctgggtcctagtttatgcttgtggcagaagcagtgagtaactgggaggaagttggtgagtaagcttcaaggaagaagtcatttttagtactctggatcttcctgattttaaagcactacaaaatggtgcattttcattcttgtcaagtgataacagatatattctgatgagcctgaaatgaatatatattgtatcatttttataatatctagcaaggtttgtattttcctagaacttgaactaaatttcagttcataaaatttataaaatacttagttgttgtaaaatatttttggaatgttcacataggtgacacacaaatgtcccattttcattctttctatagtaaatatgttctgatatgtgaaggtttagcagatgcatcagcatttaatcctagaggatctggcataatcttttcccccaagaatagaaattttttctgcttatgaaagtagtacatgtttctttaaaaacaaatcaatattgacttctgcctgctgtatagcactatgcctccacctggccatgaccaggggcatgtcctggtccacctacctgaaaatgtttgcaaccagcctcctggccatgtgcacaggggctgaagttgtcccacaggtattacgggccaacctgacaatacatgaagttccaccaaagtctgagaactcagaactgagctttggggactgaaagacagcacaaacctcaaatttctcagcactggaaacctcaaaatataactgaattccataaataagattttaagtcttaaatatgtatttttaaatgtattaaaagtcaagctgcttgtatttaagcacctaatacaatgcttaggttgtaaaaggagatgctcaataggtactaactgatatattgagatttaattatggtttgaccaatatttattggaaaccgccaaagcttaaatcatcagcttcttgaatgtgatttgaaaggtaatttagtattgaatagcatgtgagctagagtatttcattctttctggtttatttcttcaaatagactttgaatataatggtgaatgggtattataaattaactaataaaaatgacattgaaaatgaaaaaatatatatattaaagtgtagaaagtgaccaggcaccggtggatcccctaactacaaggaacccctagtgatggagttggccactccctctctgcgcgctcgctcgctcactgaggccgggcgaccaaaggtcgcccgacgcccgggctttgcccgggcggcctcagtgagcgagcgagcgcgcagagagggagtggccaacaggaagctcctctgtgtcctcataaaccctaacctcctctacttgagaggacattccaatcataggctgcccatccaccctctgtgtcctcctgttaattaggtcacttaacaaaaaggaaattgggtaggggtttttcacagaccgctttctaagggtaattttaaaatatctgggaagtcccttccactgctgtgttccagaagtgttggtaaacagcccacaaatgtcaacagcagaaacatacaagctgtcagctttgcacaagggcccaatctctggaagatccgcgcgtaccgagttctaattcactggccgtcgttttacaacgtcgtgactgggaaaaccctggcgttacccaacttaatcgccttgcagcacatccccctttcgccagctggcgtaatagcgaagaggcccgcaccgatcgcccttcccaacagttgcgcagcctgaatggcgaatggcgcctgatgcggtattttctccttacgcatctgtgcggtatttcacaccgcatatggtgcactctcagtacaatctgctctgatgccgcatagttaagccagccccgacacccgccaacacccgctgacgcgccctgacgggcttgtctgctcccggcatccgcttacagacaagctgtgaccgtctccgggagctgcatgtgtcagaggttttcaccgtcatcaccgaaacgcgcgagacgaaagggcctcgtgatacgcctatttttataggttaatgtcatgataataatggtttcttagacgtcaggtggcacttttcggggaaatgtgcgcggaacccccatttgtttatttttctaaatacattcaaatatgtatccgctcatgagacaataaccctgataaatgcttcaataatattgaaaaaggaagagtatgagccatattcaacgggaaacgtcttgctctaggccgcgattaaattccaacatggatgctgatttatatgggtataaatgggctcgcgataatgtcgggcaatcaggtgcgacaatctatcgattgtatgggaagcccgatgcgccagagttgtttctgaaacatggcaaaggtagcgttgccaatgatgttacagatgagatggtcagactaaactggctgacggaatttatgcctcttccgaccatcaagcattttatccgtactcctgatgatgcatggttactcaccactgcgatccctgggaaaacagcattccaggtattagaagaatatcctgattcaggtgaaaatattgttgatgcgctggcagtgttcctgcgccggttgcattcgattcctgtttgtaattgtccttttaacagcgatcgcgtatttcgtctcgctcaggcgcaatcacgaatgaataacggtttggttgatgcgagtgattttgatgacgagcgtaatggctggcctgttgaacaagtctggaaagaaatgcataaacttttgccattctcaccggattcagtcgtcactcatggtgatttctcacttgataaccttatttttgacgaggggaaattaataggttgtattgatgttggacgagtcggaatcgcagaccgataccaggatcttgccatcctatggaactgcctcggtgagttttctccttcattacagaaacggctttttcaaaaatatggtattgataatcctgatatgaataaattgcagtttcatttgatgctcgatgagtttttctaaaagcttgtgcaatgccacaaagaagagtcaatcgcagacaacattttgaatgcggtcacacgttagcagcatgattgccacggatggcaacatattaacggcatgatattgacttattgaataaaattgggtaaatttgactcaacgatgggttaattcgctcgttgtggtagtgagatgaaaagaggcggcgcttactaccgattccgcctagttggtcacttcgacgtatcgtctggaactccaaccatcgcaggcagagaggtctgcaaaatgcaatcccgaaacagttcgcaggtaatagttagagcctgcataacggtttcgggattttttatatctgcacaacaggtaagagcattgagtcgataatcgtgaagagtcggcgagcctggttagccagtgctctttccgttgtgctgaattaagcgaataccggaagcagaaccggatcaccaaatgcgtacaggcgtcatcgccgcccagcaacagcacaacccaaactgagccgtagccactgtctgtcctgaattcattagtaatagttacgctgcggccttttacacatgaccttcgtgaaagcgggtggcaggaggtcgcgctaacaacctcctgccgttttgcccgtgcatatcggtcacgaacaaatctgattactaaacacagtagcctggatttgttctatcagtaatcgaccttattcctaattaaatagagcaaatccccttattgggggtaagacatgaagatgccagaaaaacatgacctgttggccgccattctcgcggcaaaggaacaaggcatcggggcaatccttgcgtttgcaatggcgtaccttcgcggcagatataatggcggtgcgtttacaaaaacagtaatcgacgcaacgatgtgcgccattatcgcctggttcattcgtgaccttctcgacttcgccggactaagtagcaatctcgcttatataacgagcgtgtttatcggctacatcggtactgactcgattggttcgcttatcaaacgcttcgctgctaaaaaagccggagtagaagatggtagaaatcaataatcaacgtaaggcgttcctcgatatgctggcgtggtcggagggaactgataacggacgtcagaaaaccagaaatcatggttatgacgtcattgtaggcggagagctatttactgattactccgatcaccctcgcaaacttgtcacgctaaacccaaaactcaaatcaacaggcgccggacgctaccagcttctttcccgttggtgggatgcctaccgcaagcagcttggcctgaaagacttctctccgaaaagtcaggacgctgtggcattgcagcagattaaggagcgtggcgctttacctatgattgatcgtggtgatatccgtcaggcaatcgaccgttgcagcaatatctgggcttcactgccgggcgctggttatggtcagttcgagcataaggctgacagcctgattgcaaaattcaaagaagcgggcggaacggtcagagagattgatgtatgagcagagtcaccgcgattatctccgctctggttatctgcatcatcgtctgcctgtcatgggctgttaatcattaccgtgataacgccattacctacaaagcccagcgcgacaaaaatgccagagaactgaagctggcgaacgcggcaattactgacatgcagatgcgtcagcgtgatgttgctgcgctcgatgcaaaatacacgaaggagttagctgatgctaaagctgaaaatgatgctctgcgtgatgatgttgccgctggtcgtcgtcggttgcacatcaaagcagtctgtcagtcagtgcgtgaagccaccaccgcctccggcgtggataatgcagcctccccccgactggcagacaccgctgaacgggattatttcaccctcagagagaggctgatcactatgcaaaaacaactggaaggaacccagaagtatattaatgagcagtgcagatagagttgcccatatcgatgggcaactcatgcaattattgtgagcaatacacacgcgcttccagcggagtataaatgcctaaagtaataaaaccgagcaatccatttacgaatgtttgctgggtttctgttttaacaacattttctgcgccgccacaaattttggctgcatcgacagttttcttctgcccaattccagaaacgaagaaatgatgggtgatggtttcctttggtgctactgctgccggtttgttttgaacagtaaacgtctgttgagcacatcctgtaataagcagggccagcgcagtagcgagtagcatttttttcatggtgttattcccgatgctttttgaagttcgcagaatcgtatgtgtagaaaattaaacaaaccctaaacaatgagttgaaatttcatattgttaatatttattaatgtatgtcaggtgcgatgaatcgtcattgtattcccggattaactatgtccacagccctgacggggaacttctctgcgggagtgtccgggaataattaaaacgatgcacacagggtttagcgcgtacacgtattgcattatgccaacgccccggtgctgacacggaagaaaccggacgttatgatttagcgtggaaagatttgtgtagtgttctgaatgctctcagtaaatagtaatgaattatcaaaggtatagtaatatcttttatgttcatggatatttgtaacccatcggaaaactcctgctttagcaagattttccctgtattgctgaaatgtgatttctcttgatttcaacctatcataggacgtttctataagatgcgtgtttcttgagaatttaacatttacaacctttttaagtccttttattaacacggtgttatcgttttctaacacgatgtgaatattatctgtggctagatagtaaatataatgtgagacgttgtgacgtttgctagcctgtcagaccaagtttactcatatatactttagattgatttaaaacttcatttttaatttaaaaggatctaggtgaagatcctttttgataatctcatgaccaaaatcccttaacgtgagttttcgttccactgagcgtcagaccccgtagaaaagatcaaaggatcttcttgagatcctttttttctgcgcgtaatctgctgcttgcaaacaaaaaaaccaccgctaccagcggtggtttgtttgccggatcaagagctaccaactctttttccgaaggtaactggcttcagcagagcgcagataccaaatactgttcttctagtgtagccgtagttaggccaccacttcaagaactctgtagcaccgcctacatacctcgctctgctaatcctgttaccagtggctgctgccagtggcgataagtcgtgtcttaccgggttggactcaagacgatagttaccggataaggcgcagcggtcgggctgaacggggggttcgtgcacacagcccagcttggagcgaacgacctacaccgaactgagatacctacagcgtgagctatgagaaagcgccacgcttcccgaagggagaaaggcggacaggtatccggtaagcggcagggtcggaacaggagagcgcacgagggagcttccagggggaaacgcctggtatctttatagtcctgtcgggtttcgccacctctgacttgagcgtcgatttttgtgatgctcgtcaggggggcggagcctatggaaaaacgccagcaacgcggcctttttacggttcctggccttttgctggccttttgctcacatgttctttcctgcgttatcccctgattctgtggataaccgtattaccgcctttgagtgagctgataccgctcgccgcagccgaacgaccgagcgcagcgagtcagtgagcgaggaagcggaagagcgcccaatacgcaaaccgcctctccccgcgcgttggccgattcattaatgcagctggcacgacaggtttcccgactggaaagcgggcagtgagcgcaacgcaattaatgtgagttagctcactcattaggcaccccaggctttacactttatgcttccggctcgtatgttgtgtggaattgtgagcggataacaatttcacacaggaaacagctatgaccatgattacgccaagtttgcacgcctgccgttcgacgatttcgcgagttggttcagctgctgcctgaggctggacgacctcgcggagttctaccggcagtgcaaatccgtcggcatccaggaaaccagcagcggctatccgcgcatccatgcccccgaactgcaggagtggggaggcacgatggccgctttggtccggatctttgtgaaggaaccttacttctgtggtgtgacataattggacaaactacctacagagatttaaagctctaaggtaaatataaaatttttaagtgtataatgtgttaaactactgattctaattgtttgtgtattttagattccaacctatggaactgatgaatgggagcagtggtggaatgcctttaatgaggaaaacctgttttgctcagaagaaatgccatctagtgatgatgaggctactgctgactctcaacattctactcctccaaaaaagaagagaaaggtagaagaccccaaggactttccttcagaattgctaagttttttgagtcatgctgtgtttagtaatagaactcttgcttgctttgctatttacaccacaaaggaaaaagctgcactgctatacaagaaaattatggaaaaatattctgtaacctttataagtaggcataacagttataatcataacatactgttttttcttactccacacaggcatagagtgt

SEQ ID NO: 66 - DNA, 11432 bp, synthetic construct
  source 1..11432: mol_type = other DNA
ctgctattaataactatgctcaaaaattgtgtacctttagctttttaatttgtaaaggggttaataaggaatatttgatgtatagtgccttgactagagatcataatcagccataccacatttgtagaggttttacttgctttaaaaaacctcccacacctccccctgaacctgaaacataaaatgaatgcaattgttgttgttctagcttggccactccctctctgcgcgctcgctcgctcactgaggccgggcgaccaaaggtcgcccgacgcccgggctttgcccgggcggcctcagtgagcgagcgagcgcgcagagagggagtggccaactccatcactaggggttcctctcgaggagcttggcccattgcatacgttgtatccatatcataatatgtacatttatattggctcatgtccaacattaccgccatgttactagtgtcgacaggctcagaggcacacaggagtttctgggctcaccctgcccccttccaacccctcagttcccatcctccagcagctgtttgtgtgctgcctctgaagtccacactgaacaaacttcagcctactcatgtccctaaaatgggcaaacattgcaagcagcaaacagcaaacacacagccctccctgcctgctgaccttggagctggggcagaggtcagagacctctctgggcccatgccacctccaacatccactcgaccccttggaatttcggtggagaggagcagaggttgtcctggcgtggtttaggtagtgtgagaggggtcgacgatcttgctaccagtggaacagccactaaggattctgcagtgagagcagagggccagctaagtggtactctcccagagactgtctgactcacgccaccccctccaccttggacacaggacgctgtggtttctgagccaggtacaatgactcctttcggtaagtgcagtggaagctgtacactgcccaggcaaagcgtccgggcagcgtaggcgggcgactcagatcccagccagtggacttagcccctgtttgctcctccgataactggggtgaccttggttaatattcaccagcagcctcccccgttgcccctctggatccactgcttaaatacggacgaggacagggccctgtctcctcagcttcaggcaccaccactgacctgggacagtgaatcgtaagtatgcctttcactgcgagaggttctggagaggcttctgagctccccatggcccaggcaggcagcaggtctggggcaggaggggggttgtggagtgggtatccgcctgctgaggtgcagggcagatcatcatgtgccttgactcggggcctggcccccccatctctgtcttgcaggacaattgccgtcttctgtctcgtggggcatcctcctgctggcaggcctgtgctgcctggtccctgtctccctggctgaggaccgggtaccgccaccatgagcacagctgtcctggagaaccctggcctgggcaggaagctgtctgactttggccaggagacctcttacattgaggataactgcaaccagaatggagccatcagcctgatcttctcccttaaggaagaggtgggagctctggccaaagtgctcagactgtttgaagagaatgatgtgaacctgacccacattgagagcagacctagcaggctgaagaaagatgaatatgaattcttcacccacttggacaagagaagcctccctgccctgaccaacatcatcaaaatcctgaggcatgacataggagccactgttcatgagctcagcagagacaagaagaaagacacagtcccctggttcccaagaaccatccaggagctggacagatttgccaaccagatcctgagctatggggctgaactggatgctgaccaccctggcttcaaggaccctgtgtacagggccagaagaaagcagtttgctgacattgcctacaactacagacatggccaacccatccctagagtggaatacatggaggaagagaagaagacctggggcacagtgttcaaaaccctcaagagcctgtacaagacccacgcatgctatgagtacaaccacatcttccctctgctggagaagtactgtggcttccatgaggacaacatcccccagctggaggatgtgtcccagttcctgcagacctgtacaggcttcaggctgagacctgtggctggcctgctgagctccagagacttcctgggaggcctggccttcagagttttccactgcacccagtacatcagacacggctccaagcccatgtacacccctgaacctgacatctgccatgagctgctgggccacgtccccctgttctctgacagaagctttgcccagttcagccaagaaattggcctggccagcctgggtgcccctgatgagtacattgagaagctggccacaatctactggttcacagtggaatttggcctgtgcaagcagggagactccatcaaggcctatggtgctggcctgctgagcagctttggagagctgcagtactgcctgtcagaaaaacctaagctcctgcctctggagctggaaaaaacagccatccaaaactacacagtgacagagttccagcccctgtactatgtggctgagagcttcaatgatgccaaggagaaggtgaggaactttgcagccaccatccccagacctttctctgtgagatatgacccctacacccagagaatagaggtgctggataacacccagcaactgaagatcctggcagacagcatcaactctgagattggcatcctgtgctctgccctgcagaagatcaagtgaagatctgcctcgactgtgccttctagttgccagccatctgttgtttgcccctcccccgtgccttccttgaccctggaaggtgccactcccactgtcctttcctaataaaatgaggaaattgcatcgcattgtctgagtaggtgtcattctattctggggggtggggtggggcaggacagcaagggggaggattgggaagacaatagcaggcatgctggggatgcggtgggctctatggggcgcgccgtacccattgccaagttctgacaactgtctgtctatagccaattatgcatttcttaaattagaacccccccaatatacccaaatatatatatatgtgtgcatatatatagtaagttgtaacaaagttgtgaattcatacctgaagtatctcaagtgatgcaagttttatgaatttttgtttatgccttttgggaagagttgtattgacaaattttttatgcttaaagtaaaccataaatcaaaaaaataaaatctaggatgcaataaaacaaaacaacttcttgacataagtatggtatgtaaatctgttttgattggaaatcaatttgttatattgccagaattcctgttttagaatacatctctgctgatctgtctgtattcttagactgcatatctgggatgaactctgggcagaattcacatgggcttcctttgaaataaacaagacttttcaaattcttagtcgatctgcagaacctgtagccaggcactgaaccattttgatagatgcagtaatcgttgcaagtgtatatttcaaggagttctggctgggtcctagtttatgcttgtggcagaagcagtgagtaactgggaggaagttggtgagtaagcttcaaggaagaagtcatttttagtactctggatcttcctgattttaaagcactacaaaatggtgcattttcattcttgtcaagtgataacagatatattctgatgagcctgaaatgaatatatattgtatcatttttataatatctagcaaggtttgtattttcctagaacttgaactaaatttcagttcataaaatttataaaatacttagttgttgtaaaatatttttggaatgttcacataggtgacacacaaatgtcccattttcattctttctatagtaaatatgttctgatatgtgaaggtttagcagatgcatcagcatttaatcctagaggatctggcataatcttttcccccaagaatagaaattttttctgcttatgaaagtagtacatgtttctttaaaaacaaatcaatattgacttctgcctgctgtatagcactatgcctccacctggccatgaccaggggcatgtcctggtccacctacctgaaaatgtttgcaaccagcctcctggccatgtgcacaggggctgaagttgtcccacaggtattacgggccaacctgacaatacatgaagttccaccaaagtctgagaactcagaactgagctttggggactgaaagacagcacaaacctcaaatttctcagcactggaaacctcaaaatataactgaattccataaataagattttaagtcttaaatatgtatttttaaatgtattaaaagtcaagctgcttgtatttaagcacctaatacaatgcttaggttgtaaaaggagatgctcaataggtactaactgatatattgagatttaattatggtttgaccaatatttattggaaaccgccaaagcttaaatcatcagcttcttgaatgtgatttgaaaggtaatttagtattgaatagcatgtgagctagagtatttcattctttctggtttatttcttcaaatagactttgaatataatggtgaatgggtattataaattaactaataaaaatgacattgaaaatgaaaaaatatatatattaaagtgtagaaagtgaccaggcaccggtggatcccctaactacaaggaacccctagtgatggagttggccactccctctctgcgcgctcgctcgctcactgaggccgggcgaccaaaggtcgcccgacgcccgggctttgcccgggcggcctcagtgagcgagcgagcgcgcagagagggagtggccaacaggaagctcctctgtgtcctcataaaccctaacctcctctacttgagaggacattccaatcataggctgcccatccaccctctgtgtcctcctgttaattaggtcacttaacaaaaaggaaattgggtaggggtttttcacagaccgctttctaagggtaattttaaaatatctgggaagtcccttccactgctgtgttccagaagtgttggtaaacagcccacaaatgtcaacagcagaaacatacaagctgtcagctttgcacaagggcccaatctctggaagatccgcgcgtaccgagttctaattcactggccgtcgttttacaacgtcgtgactgggaaaaccctggcgttacccaacttaatcgccttgcagcacatccccctttcgccagctggcgtaatagcgaagaggcccgcaccgatcgcccttcccaacagttgcgcagcctgaatggcgaatggcgcctgatgcggtattttctccttacgcatctgtgcggtatttcacaccgcatatggtgcactctcagtacaatctgctctgatgccgcatagttaagccagccccgacacccgccaacacccgctgacgcgccctgacgggcttgtctgctcccggcatccgcttacagacaagctgtgaccgtctccgggagctgcatgtgtcagaggttttcaccgtcatcaccgaaacgcgcgagacgaaagggcctcgtgatacgcctatttttataggttaatgtcatgataataatggtttcttagacgtcaggtggcacttttcggggaaatgtgcgcggaacccccatttgtttatttttctaaatacattcaaatatgtatccgctcatgagacaataaccctgataaatgcttcaataatattgaaaaaggaagagtatgagccatattcaacgggaaacgtcttgctctaggccgcgattaaattccaacatggatgctgatttatatgggtataaatgggctcgcgataatgtcgggcaatcaggtgcgacaatctatcgattgtatgggaagcccgatgcgccagagttgtttctgaaacatggcaaaggtagcgttgccaatgatgttacagatgagatggtcagactaaactggctgacggaatttatgcctcttccgaccatcaagcattttatccgtactcctgatgatgcatggttactcaccactgcgatccctgggaaaacagcattccaggtattagaagaatatcctgattcaggtgaaaatattgttgatgcgctggcagtgttcctgcgccggttgcattcgattcctgtttgtaattgtccttttaacagcgatcgcgtatttcgtctcgctcaggcgcaatcacgaatgaataacggtttggttgatgcgagtgattttgatgacgagcgtaatggctggcctgttgaacaagtctggaaagaaatgcataaacttttgccattctcaccggattcagtcgtcactcatggtgatttctcacttgataaccttatttttgacgaggggaaattaataggttgtattgatgttggacgagtcggaatcgcagaccgataccaggatcttgccatcctatggaactgcctcggtgagttttctccttcattacagaaacggctttttcaaaaatatggtattgataatcctgatatgaataaattgcagtttcatttgatgctcgatgagtttttctaaaagcttgtgcaatgccacaaagaagagtcaatcgcagacaacattttgaatgcggtcacacgttagcagcatgattgccacggatggcaacatattaacggcatgatattgacttattgaataaaattgggtaaatttgactcaacgatgggttaattcgctcgttgtggtagtgagatgaaaagaggcggcgcttactaccgattccgcctagttggtcacttcgacgtatcgtctggaactccaaccatcgcaggcagagaggtctgcaaaatgcaatcccgaaacagttcgcaggtaatagttagagcctgcataacggtttcgggattttttatatctgcacaacaggtaagagcattgagtcgataatcgtgaagagtcggcgagcctggttagccagtgctctttccgttgtgctgaattaagcgaataccggaagcagaaccggatcaccaaatgcgtacaggcgtcatcgccgcccagcaacagcacaacccaaactgagccgtagccactgtctgtcctgaattcattagtaatagttacgctgcggccttttacacatgaccttcgtgaaagcgggtggcaggaggtcgcgctaacaacctcctgccgttttgcccgtgcatatcggtcacgaacaaatctgattactaaacacagtagcctggatttgttctatcagtaatcgaccttattcctaattaaatagagcaaatccccttattgggggtaagacatgaagatgccagaaaaacatgacctgttggccgccattctcgcggcaaaggaacaaggcatcggggcaatccttgcgtttgcaatggcgtaccttcgcggcagatataatggcggtgcgtttacaaaaacagtaatcgacgcaacgatgtgcgccattatcgcctggttcattcgtgaccttctcgacttcgccggactaagtagcaatctcgcttatataacgagcgtgtttatcggctacatcggtactgactcgattggttcgcttatcaaacgcttcgctgctaaaaaagccggagtagaagatggtagaaatcaataatcaacgtaaggcgttcctcgatatgctggcgtggtcggagggaactgataacggacgtcagaaaaccagaaatcatggttatgacgtcattgtaggcggagagctatttactgattactccgatcaccctcgcaaacttgtcacgctaaacccaaaactcaaatcaacaggcgccggacgctaccagcttctttcccgttggtgggatgcctaccgcaagcagcttggcctgaaagacttctctccgaaaagtcaggacgctgtggcattgcagcagattaaggagcgtggcgctttacctatgattgatcgtggtgatatccgtcaggcaatcgaccgttgcagcaatatctgggcttcactgccgggcgctggttatggtcagttcgagcataaggctgacagcctgattgcaaaattcaaagaagcgggcggaacggtcagagagattgatgtatgagcagagtcaccgcgattatctccgctctggttatctgcatcatcgtctgcctgtcatgggctgttaatcattaccgtgataacgccattacctacaaagcccagcgcgacaaaaatgccagagaactgaagctggcgaacgcggcaattactgacatgcagatgcgtcagcgtgatgttgctgcgctcgatgcaaaatacacgaaggagttagctgatgctaaagctgaaaatgatgctctgcgtgatgatgttgccgctggtcgtcgtcggttgcacatcaaagcagtctgtcagtcagtgcgtgaagccaccaccgcctccggcgtggataatgcagcctccccccgactggcagacaccgctgaacgggattatttcaccctcagagagaggctgatcactatgcaaaaacaactggaaggaacccagaagtatattaatgagcagtgcagatagagttgcccatatcgatgggcaactcatgcaattattgtgagcaatacacacgcgcttccagcggagtataaatgcctaaagtaataaaaccgagcaatccatttacgaatgtttgctgggtttctgttttaacaacattttctgcgccgccacaaattttggctgcatcgacagttttcttctgcccaattccagaaacgaagaaatgatgggtgatggtttcctttggtgctactgctgccggtttgttttgaacagtaaacgtctgttgagcacatcctgtaataagcagggccagcgcagtagcgagtagcatttttttcatggtgttattcccgatgctttttgaagttcgcagaatcgtatgtgtagaaaattaaacaaaccctaaacaatgagttgaaatttcatattgttaatatttattaatgtatgtcaggtgcgatgaatcgtcattgtattcccggattaactatgtccacagccctgacggggaacttctctgcgggagtgtccgggaataattaaaacgatgcacacagggtttagcgcgtacacgtattgcattatgccaacgccccggtgctgacacggaagaaaccggacgttatgatttagcgtggaaagatttgtgtagtgttctgaatgctctcagtaaatagtaatgaattatcaaaggtatagtaatatcttttatgttcatggatatttgtaacccatcggaaaactcctgctttagcaagattttccctgtattgctgaaatgtgatttctcttgatttcaacctatcataggacgtttctataagatgcgtgtttcttgagaatttaacatttacaacctttttaagtccttttattaacacggtgttatcgttttctaacacgatgtgaatattatctgtggctagatagtaaatataatgtgagacgttgtgacgtttgctagcctgtcagaccaagtttactcatatatactttagattgatttaaaacttcatttttaatttaaaaggatctaggtgaagatcctttttgataatctcatgaccaaaatcccttaacgtgagttttcgttccactgagcgtcagaccccgtagaaaagatcaaaggatcttcttgagatcctttttttctgcgcgtaatctgctgcttgcaaacaaaaaaaccaccgctaccagcggtggtttgtttgccggatcaagagctaccaactctttttccgaaggtaactggcttcagcagagcgcagataccaaatactgttcttctagtgtagccgtagttaggccaccacttcaagaactctgtagcaccgcctacatacctcgctctgctaatcctgttaccagtggctgctgccagtggcgataagtcgtgtcttaccgggttggactcaagacgatagttaccggataaggcgcagcggtcgggctgaacggggggttcgtgcacacagcccagcttggagcgaacgacctacaccgaactgagatacctacagcgtgagctatgagaaagcgccacgcttcccgaagggagaaaggcggacaggtatccggtaagcggcagggtcggaacaggagagcgcacgagggagcttccagggggaaacgcctggtatctttatagtcctgtcgggtttcgccacctctgacttgagcgtcgatttttgtgatgctcgtcaggggggcggagcctatggaaaaacgccagcaacgcggcctttttacggttcctggccttttgctggccttttgctcacatgttctttcctgcgttatcccctgattctgtggataaccgtattaccgcctttgagtgagctgataccgctcgccgcagccgaacgaccgagcgcagcgagtcagtgagcgaggaagcggaagagcgcccaatacgcaaaccgcctctccccgcgcgttggccgattcattaatgcagctggcacgacaggtttcccgactggaaagcgggcagtgagcgcaacgcaattaatgtgagttagctcactcattaggcaccccaggctttacactttatgcttccggctcgtatgttgtgtggaattgtgagcggataacaatttcacacaggaaacagctatgaccatgattacgccaagtttgcacgcctgccgttcgacgatttcgcgagttggttcagctgctgcctgaggctggacgacctcgcggagttctaccggcagtgcaaatccgtcggcatccaggaaaccagcagcggctatccgcgcatccatgcccccgaactgcaggagtggggaggcacgatggccgctttggtccggatctttgtgaaggaaccttacttctgtggtgtgacataattggacaaactacctacagagatttaaagctctaaggtaaatataaaatttttaagtgtataatgtgttaaactactgattctaattgtttgtgtattttagattccaacctatggaactgatgaatgggagcagtggtggaatgcctttaatgaggaaaacctgttttgctcagaagaaatgccatctagtgatgatgaggctactgctgactctcaacattctactcctccaaaaaagaagagaaaggtagaagaccccaaggactttccttcagaattgctaagttttttgagtcatgctgtgtttagtaatagaactcttgcttgctttgctatttacaccacaaaggaaaaagctgcactgctatacaagaaaattatggaaaaatattctgtaacctttataagtaggcataacagttataatcataacatactgttttttcttactccacacaggcatagagtgt

SEQ ID NO: 67 - DNA, 9425 bp, synthetic construct
  source 1..9425: mol_type = other DNA
ctgctattaataactatgctcaaaaattgtgtacctttagctttttaatttgtaaaggggttaataaggaatatttgatgtatagtgccttgactagagatcataatcagccataccacatttgtagaggttttacttgctttaaaaaacctcccacacctccccctgaacctgaaacataaaatgaatgcaattgttgttgttctagcttggccactccctctctgcgcgctcgctcgctcactgaggccgggcgaccaaaggtcgcccgacgcccgggctttgcccgggcggcctcagtgagcgagcgagcgcgcagagagggagtggccaactccatcactaggggttcctctcgaggcggccgcccctctcacactacctaaaccacgccaggacaacctctgctcctctccaccgaaattccaaggggtcgagtggatgttggaggtggcatgggcccagagaggtctctgacctctgccccagctccaaggtcagcaggcagggagggctgtgtgtttgctgtttgctgcttgcaatgtttgcccattttagggacatgagtaggctgaagtttgttcagtgtggacttcagaggcagcacacaaacagctgctggaggatgggaactgaggggttggaagggggcagggtgagcccagaaactcctgtgtgcctctgagcctgcagacgcgaaacgtcgactggacacaggacgctgtggtttctgagccagggggcgactcagatcccagccagtggacttagcccctgtttgctcctccgataactggggtgaccttggttaatattcaccagcagcctcccccgttgcccctctggatccactgcttaaatacggacgaggacagggccctgtctcctcagcttcaggcaccaccactgacctgggacagtgaatcgtaagtatgcctttcactgcgagaggttctggagaggcttctgagctccccatggcccaggcaggcagcaggtctggggcaggaggggggttgtggagtgccttgactcggggcctggcccccccatctctgtcttgcaggacaattgccgtcttctgtctcgtggggcatcctcctgctggcaggcctgtgctgcctggtccctgcgatcgccaccatgtccactgcggtcctggaaaacccaggcttgggcaggaaactctctgactttggacaggaaacaagctatattgaagacaactgcaatcaaaatggtgccatatcactgatcttctcactcaaagaagaagttggtgcattggccaaagtattgcgcttatttgaggagaatgatgtaaacctgacccacattgaatctagaccttctcgtttaaagaaagatgagtatgaatttttcacccatttggataaacgtagcctgcctgctctgacaaacatcatcaagatcttgaggcatgacattggtgccactgtccatgagctttcacgagataagaagaaagacacagtgccctggttcccaagaaccattcaagagctggacagatttgccaatcagattctcagctatggagcggaactggatgctgaccaccctggttttaaagatcctgtgtaccgtgcaagacggaagcagtttgctgacattgcctacaactaccgccatgggcagcccatccctcgagtggaatacatggaggaagaaaagaaaacatggggcacagtgttcaagactctgaagtccttgtataaaacccatgcttgctatgagtacaatcacatttttccacttcttgaaaagtactgtggcttccatgaagataacattccccagctggaagacgtttctcagttcctgcagacttgcactggtttccgcctccgacctgtggctggcctgctttcctctcgggatttcttgggtggcctggccttccgagtcttccactgcacacagtacatcagacatggatccaagcccatgtatacccccgaacctgacatctgccatgagctgttgggacatgtgcccttgttttcagatcgcagctttgcccagttttcccaggaaattggccttgcctctctgggtgcacctgatgaatacattgaaaagctcgccacaatttactggtttactgtggagtttgggctctgcaaacaaggagactccataaaggcatatggtgctgggctcctgtcatcctttggtgaattacagtactgcttatcagagaagccaaagcttctccccctggagctggagaagacagccatccaaaattacactgtcacggagttccagcccctctattacgtggcagagagttttaatgatgccaaggagaaagtaaggaactttgctgccacaatacctcggcccttctcagttcgctacgacccatacacccaaaggattgaggtcttggacaatacccagcagcttaagattttggctgattccattaacagtgaaattggaatcctttgcagtgccctccagaaaataaagtaaagatctgcctcgactgtgccttctagttgccagccatctgttgtttgcccctcccccgtgccttccttgaccctggaaggtgccactcccactgtcctttcctaataaaatgaggaaattgcatcgcattgtctgagtaggtgtcattctattctggggggtggggtggggcaggacagcaagggggaggattgggaagacaatagcaggcatgctggggatgcggtgggctctatggatcccctaactacaaggaacccctagtgatggagttggccactccctctctgcgcgctcgctcgctcactgaggccgggcgaccaaaggtcgcccgacgcccgggctttgcccgggcggcctcagtgagcgagcgagcgcgcagagagggagtggccaacaggaagctcctctgtgtcctcataaaccctaacctcctctacttgagaggacattccaatcataggctgcccatccaccctctgtgtcctcctgttaattaggtcacttaacaaaaaggaaattgggtaggggtttttcacagaccgctttctaagggtaattttaaaatatctgggaagtcccttccactgctgtgttccagaagtgttggtaaacagcccacaaatgtcaacagcagaaacatacaagctgtcagctttgcacaagggcccaatctctggaagatccgcgcgtaccgagttctaattcactggccgtcgttttacaacgtcgtgactgggaaaaccctggcgttacccaacttaatcgccttgcagcacatccccctttcgccagctggcgtaatagcgaagaggcccgcaccgatcgcccttcccaacagttgcgcagcctgaatggcgaatggcgcctgatgcggtattttctccttacgcatctgtgcggtatttcacaccgcatatggtgcactctcagtacaatctgctctgatgccgcatagttaagccagccccgacacccgccaacacccgctgacgcgccctgacgggcttgtctgctcccggcatccgcttacagacaagctgtgaccgtctccgggagctgcatgtgtcagaggttttcaccgtcatcaccgaaacgcgcgagacgaaagggcctcgtgatacgcctatttttataggttaatgtcatgataataatggtttcttagacgtcaggtggcacttttcggggaaatgtgcgcggaacccccatttgtttatttttctaaatacattcaaatatgtatccgctcatgagacaataaccctgataaatgcttcaataatattgaaaaaggaagagtatgagccatattcaacgggaaacgtcttgctctaggccgcgattaaattccaacatggatgctgatttatatgggtataaatgggctcgcgataatgtcgggcaatcaggtgcgacaatctatcgattgtatgggaagcccgatgcgccagagttgtttctgaaacatggcaaaggtagcgttgccaatgatgttacagatgagatggtcagactaaactggctgacggaatttatgcctcttccgaccatcaagcattttatccgtactcctgatgatgcatggttactcaccactgcgatccctgggaaaacagcattccaggtattagaagaatatcctgattcaggtgaaaatattgttgatgcgctggcagtgttcctgcgccggttgcattcgattcctgtttgtaattgtccttttaacagcgatcgcgtatttcgtctcgctcaggcgcaatcacgaatgaataacggtttggttgatgcgagtgattttgatgacgagcgtaatggctggcctgttgaacaagtctggaaagaaatgcataaacttttgccattctcaccggattcagtcgtcactcatggtgatttctcacttgataaccttatttttgacgaggggaaattaataggttgtattgatgttggacgagtcggaatcgcagaccgataccaggatcttgccatcctatggaactgcctcggtgagttttctccttcattacagaaacggctttttcaaaaatatggtattgataatcctgatatgaataaattgcagtttcatttgatgctcgatgagtttttctaaaagcttgtgcaatgccacaaagaagagtcaatcgcagacaacattttgaatgcggtcacacgttagcagcatgattgccacggatggcaacatattaacggcatgatattgacttattgaataaaattgggtaaatttgactcaacgatgggttaattcgctcgttgtggtagtgagatgaaaagaggcggcgcttactaccgattccgcctagttggtcacttcgacgtatcgtctggaactccaaccatcgcaggcagagaggtctgcaaaatgcaatcccgaaacagttcgcaggtaatagttagagcctgcataacggtttcgggattttttatatctgcacaacaggtaagagcattgagtcgataatcgtgaagagtcggcgagcctggttagccagtgctctttccgttgtgctgaattaagcgaataccggaagcagaaccggatcaccaaatgcgtacaggcgtcatcgccgcccagcaacagcacaacccaaactgagccgtagccactgtctgtcctgaattcattagtaatagttacgctgcggccttttacacatgaccttcgtgaaagcgggtggcaggaggtcgcgctaacaacctcctgccgttttgcccgtgcatatcggtcacgaacaaatctgattactaaacacagtagcctggatttgttctatcagtaatcgaccttattcctaattaaatagagcaaatccccttattgggggtaagacatgaagatgccagaaaaacatgacctgttggccgccattctcgcggcaaaggaacaaggcatcggggcaatccttgcgtttgcaatggcgtaccttcgcggcagatataatggcggtgcgtttacaaaaacagtaatcgacgcaacgatgtgcgccattatcgcctggttcattcgtgaccttctcgacttcgccggactaagtagcaatctcgcttatataacgagcgtgtttatcggctacatcggtactgactcgattggttcgcttatcaaacgcttcgctgctaaaaaagccggagtagaagatggtagaaatcaataatcaacgtaaggcgttcctcgatatgctggcgtggtcggagggaactgataacggacgtcagaaaaccagaaatcatggttatgacgtcattgtaggcggagagctatttactgattactccgatcaccctcgcaaacttgtcacgctaaacccaaaactcaaatcaacaggcgccggacgctaccagcttctttcccgttggtgggatgcctaccgcaagcagcttggcctgaaagacttctctccgaaaagtcaggacgctgtggcattgcagcagattaaggagcgtggcgctttacctatgattgatcgtggtgatatccgtcaggcaatcgaccgttgcagcaatatctgggcttcactgccgggcgctggttatggtcagttcgagcataaggctgacagcctgattgcaaaattcaaagaagcgggcggaacggtcagagagattgatgtatgagcagagtcaccgcgattatctccgctctggttatctgcatcatcgtctgcctgtcatgggctgttaatcattaccgtgataacgccattacctacaaagcccagcgcgacaaaaatgccagagaactgaagctggcgaacgcggcaattactgacatgcagatgcgtcagcgtgatgttgctgcgctcgatgcaaaatacacgaaggagttagctgatgctaaagctgaaaatgatgctctgcgtgatgatgttgccgctggtcgtcgtcggttgcacatcaaagcagtctgtcagtcagtgcgtgaagccaccaccgcctccggcgtggataatgcagcctccccccgactggcagacaccgctgaacgggattatttcaccctcagagagaggctgatcactatgcaaaaacaactggaaggaacccagaagtatattaatgagcagtgcagatagagttgcccatatcgatgggcaactcatgcaattattgtgagcaatacacacgcgcttccagcggagtataaatgcctaaagtaataaaaccgagcaatccatttacgaatgtttgctgggtttctgttttaacaacattttctgcgccgccacaaattttggctgcatcgacagttttcttctgcccaattccagaaacgaagaaatgatgggtgatggtttcctttggtgctactgctgccggtttgttttgaacagtaaacgtctgttgagcacatcctgtaataagcagggccagcgcagtagcgagtagcatttttttcatggtgttattcccgatgctttttgaagttcgcagaatcgtatgtgtagaaaattaaacaaaccctaaacaatgagttgaaatttcatattgttaatatttattaatgtatgtcaggtgcgatgaatcgtcattgtattcccggattaactatgtccacagccctgacggggaacttctctgcgggagtgtccgggaataattaaaacgatgcacacagggtttagcgcgtacacgtattgcattatgccaacgccccggtgctgacacggaagaaaccggacgttatgatttagcgtggaaagatttgtgtagtgttctgaatgctctcagtaaatagtaatgaattatcaaaggtatagtaatatcttttatgttcatggatatttgtaacccatcggaaaactcctgctttagcaagattttccctgtattgctgaaatgtgatttctcttgatttcaacctatcataggacgtttctataagatgcgtgtttcttgagaatttaacatttacaacctttttaagtccttttattaacacggtgttatcgttttctaacacgatgtgaatattatctgtggctagatagtaaatataatgtgagacgttgtgacgtttgctagcctgtcagaccaagtttactcatatatactttagattgatttaaaacttcatttttaatttaaaaggatctaggtgaagatcctttttgataatctcatgaccaaaatcccttaacgtgagttttcgttccactgagcgtcagaccccgtagaaaagatcaaaggatcttcttgagatcctttttttctgcgcgtaatctgctgcttgcaaacaaaaaaaccaccgctaccagcggtggtttgtttgccggatcaagagctaccaactctttttccgaaggtaactggcttcagcagagcgcagataccaaatactgttcttctagtgtagccgtagttaggccaccacttcaagaactctgtagcaccgcctacatacctcgctctgctaatcctgttaccagtggctgctgccagtggcgataagtcgtgtcttaccgggttggactcaagacgatagttaccggataaggcgcagcggtcgggctgaacggggggttcgtgcacacagcccagcttggagcgaacgacctacaccgaactgagatacctacagcgtgagctatgagaaagcgccacgcttcccgaagggagaaaggcggacaggtatccggtaagcggcagggtcggaacaggagagcgcacgagggagcttccagggggaaacgcctggtatctttatagtcctgtcgggtttcgccacctctgacttgagcgtcgatttttgtgatgctcgtcaggggggcggagcctatggaaaaacgccagcaacgcggcctttttacggttcctggccttttgctggccttttgctcacatgttctttcctgcgttatcccctgattctgtggataaccgtattaccgcctttgagtgagctgataccgctcgccgcagccgaacgaccgagcgcagcgagtcagtgagcgaggaagcggaagagcgcccaatacgcaaaccgcctctccccgcgcgttggccgattcattaatgcagctggcacgacaggtttcccgactggaaagcgggcagtgagcgcaacgcaattaatgtgagttagctcactcattaggcaccccaggctttacactttatgcttccggctcgtatgttgtgtggaattgtgagcggataacaatttcacacaggaaacagctatgaccatgattacgccaagtttgcacgcctgccgttcgacgatttcgcgagttggttcagctgctgcctgaggctggacgacctcgcggagttctaccggcagtgcaaatccgtcggcatccaggaaaccagcagcggctatccgcgcatccatgcccccgaactgcaggagtggggaggcacgatggccgctttggtccggatctttgtgaaggaaccttacttctgtggtgtgacataattggacaaactacctacagagatttaaagctctaaggtaaatataaaatttttaagtgtataatgtgttaaactactgattctaattgtttgtgtattttagattccaacctatggaactgatgaatgggagcagtggtggaatgcctttaatgaggaaaacctgttttgctcagaagaaatgccatctagtgatgatgaggctactgctgactctcaacattctactcctccaaaaaagaagagaaaggtagaagaccccaaggactttccttcagaattgctaagttttttgagtcatgctgtgtttagtaatagaactcttgcttgctttgctatttacaccacaaaggaaaaagctgcactgctatacaagaaaattatggaaaaatattctgtaacctttataagtaggcataacagttataatcataacatactgttttttcttactccacacaggcatagagtgt

SEQ ID NO: 68 - DNA, 9473 bp, synthetic construct
  source 1..9473: mol_type = other DNA
ctgctattaataactatgctcaaaaattgtgtacctttagctttttaatttgtaaaggggttaataaggaatatttgatgtatagtgccttgactagagatcataatcagccataccacatttgtagaggttttacttgctttaaaaaacctcccacacctccccctgaacctgaaacataaaatgaatgcaattgttgttgttctagcttggccactccctctctgcgcgctcgctcgctcactgaggccgggcgaccaaaggtcgcccgacgcccgggctttgcccgggcggcctcagtgagcgagcgagcgcgcagagagggagtggccaactccatcactaggggttcctctcgaggcggccgcccctctcacactacctaaaccacgccaggacaacctctgctcctctccaccgaaattccaaggggtcgagtggatgttggaggtggcatgggcccagagaggtctctgacctctgccccagctccaaggtcagcaggcagggagggctgtgtgtttgctgtttgctgcttgcaatgtttgcccattttagggacatgagtaggctgaagtttgttcagtgtggacttcagaggcagcacacaaacagctgctggaggatgggaactgaggggttggaagggggcagggtgagcccagaaactcctgtgtgcctctgagcctgcagacgcgaaacgtcgactggacacaggacgctgtggtttctgagccagggggcgactcagatcccagccagtggacttagcccctgtttgctcctccgataactggggtgaccttggttaatattcaccagcagcctcccccgttgcccctctggatccactgcttaaatacggacgaggacagggccctgtctcctcagcttcaggcaccaccactgacctgggacagtgaatcgtaagtactagcagctacaatccagctaccattctgcttttattttatggttgggataaggctggattattctgagtccaagctaggcccttttgctaatcatgttcatacctcttatcttcctcccacagctcctgggcaacgtgctggtctgtgtgctggcccatcactttggcaaagaattgcgatcgccaccatgtccactgcggtcctggaaaacccaggcttgggcaggaaactctctgactttggacaggaaacaagctatattgaagacaactgcaatcaaaatggtgccatatcactgatcttctcactcaaagaagaagttggtgcattggccaaagtattgcgcttatttgaggagaatgatgtaaacctgacccacattgaatctagaccttctcgtttaaagaaagatgagtatgaatttttcacccatttggataaacgtagcctgcctgctctgacaaacatcatcaagatcttgaggcatgacattggtgccactgtccatgagctttcacgagataagaagaaagacacagtgccctggttcccaagaaccattcaagagctggacagatttgccaatcagattctcagctatggagcggaactggatgctgaccaccctggttttaaagatcctgtgtaccgtgcaagacggaagcagtttgctgacattgcctacaactaccgccatgggcagcccatccctcgagtggaatacatggaggaagaaaagaaaacatggggcacagtgttcaagactctgaagtccttgtataaaacccatgcttgctatgagtacaatcacatttttccacttcttgaaaagtactgtggcttccatgaagataacattccccagctggaagacgtttctcagttcctgcagacttgcactggtttccgcctccgacctgtggctggcctgctttcctctcgggatttcttgggtggcctggccttccgagtcttccactgcacacagtacatcagacatggatccaagcccatgtatacccccgaacctgacatctgccatgagctgttgggacatgtgcccttgttttcagatcgcagctttgcccagttttcccaggaaattggccttgcctctctgggtgcacctgatgaatacattgaaaagctcgccacaatttactggtttactgtggagtttgggctctgcaaacaaggagactccataaaggcatatggtgctgggctcctgtcatcctttggtgaattacagtactgcttatcagagaagccaaagcttctccccctggagctggagaagacagccatccaaaattacactgtcacggagttccagcccctctattacgtggcagagagttttaatgatgccaaggagaaagtaaggaactttgctgccacaatacctcggcccttctcagttcgctacgacccatacacccaaaggattgaggtcttggacaatacccagcagcttaagattttggctgattccattaacagtgaaattggaatcctttgcagtgccctccagaaaataaaggattacaaggatgacgacgataaggactataaggacgatgatgacaaggactacaaagatgatgacgattaaagatctgcctcgactgtgccttctagttgccagccatctgttgtttgcccctcccccgtgccttccttgaccctggaaggtgccactcccactgtcctttcctaataaaatgaggaaattgcatcgcattgtctgagtaggtgtcattctattctggggggtggggtggggcaggacagcaagggggaggattgggaagacaatagcaggcatgctggggatgcggtgggctctatggatcccctaactacaaggaacccctagtgatggagttggccactccctctctgcgcgctcgctcgctcactgaggccgggcgaccaaaggtcgcccgacgcccgggctttgcccgggcggcctcagtgagcgagcgagcgcgcagagagggagtggccaacaggaagctcctctgtgtcctcataaaccctaacctcctctacttgagaggacattccaatcataggctgcccatccaccctctgtgtcctcctgttaattaggtcacttaacaaaaaggaaattgggtaggggtttttcacagaccgctttctaagggtaattttaaaatatctgggaagtcccttccactgctgtgttccagaagtgttggtaaacagcccacaaatgtcaacagcagaaacatacaagctgtcagctttgcacaagggcccaatctctggaagatccgcgcgtaccgagttctaattcactggccgtcgttttacaacgtcgtgactgggaaaaccctggcgttacccaacttaatcgccttgcagcacatccccctttcgccagctggcgtaatagcgaagaggcccgcaccgatcgcccttcccaacagttgcgcagcctgaatggcgaatggcgcctgatgcggtattttctccttacgcatctgtgcggtatttcacaccgcatatggtgcactctcagtacaatctgctctgatgccgcatagttaagccagccccgacacccgccaacacccgctgacgcgccctgacgggcttgtctgctcccggcatccgcttacagacaagctgtgaccgtctccgggagctgcatgtgtcagaggttttcaccgtcatcaccgaaacgcgcgagacgaaagggcctcgtgatacgcctatttttataggttaatgtcatgataataatggtttcttagacgtcaggtggcacttttcggggaaatgtgcgcggaacccccatttgtttatttttctaaatacattcaaatatgtatccgctcatgagacaataaccctgataaatgcttcaataatattgaaaaaggaagagtatgagccatattcaacgggaaacgtcttgctctaggccgcgattaaattccaacatggatgctgatttatatgggtataaatgggctcgcgataatgtcgggcaatcaggtgcgacaatctatcgattgtatgggaagcccgatgcgccagagttgtttctgaaacatggcaaaggtagcgttgccaatgatgttacagatgagatggtcagactaaactggctgacggaatttatgcctcttccgaccatcaagcattttatccgtactcctgatgatgcatggttactcaccactgcgatccctgggaaaacagcattccaggtattagaagaatatcctgattcaggtgaaaatattgttgatgcgctggcagtgttcctgcgccggttgcattcgattcctgtttgtaattgtccttttaacagcgatcgcgtatttcgtctcgctcaggcgcaatcacgaatgaataacggtttggttgatgcgagtgattttgatgacgagcgtaatggctggcctgttgaacaagtctggaaagaaatgcataaacttttgccattctcaccggattcagtcgtcactcatggtgatttctcacttgataaccttatttttgacgaggggaaattaataggttgtattgatgttggacgagtcggaatcgcagaccgataccaggatcttgccatcctatggaactgcctcggtgagttttctccttcattacagaaacggctttttcaaaaatatggtattgataatcctgatatgaataaattgcagtttcatttgatgctcgatgagtttttctaaaagcttgtgcaatgccacaaagaagagtcaatcgcagacaacattttgaatgcggtcacacgttagcagcatgattgccacggatggcaacatattaacggcatgatattgacttattgaataaaattgggtaaatttgactcaacgatgggttaattcgctcgttgtggtagtgagatgaaaagaggcggcgcttactaccgattccgcctagttggtcacttcgacgtatcgtctggaactccaaccatcgcaggcagagaggtctgcaaaatgcaatcccgaaacagttcgcaggtaatagttagagcctgcataacggtttcgggattttttatatctgcacaacaggtaagagcattgagtcgataatcgtgaagagtcggcgagcctggttagccagtgctctttccgttgtgctgaattaagcgaataccggaagcagaaccggatcaccaaatgcgtacaggcgtcatcgccgcccagcaacagcacaacccaaactgagccgtagccactgtctgtcctgaattcattagtaatagttacgctgcggccttttacacatgaccttcgtgaaagcgggtggcaggaggtcgcgctaacaacctcctgccgttttgcccgtgcatatcggtcacgaacaaatctgattactaaacacagtagcctggatttgttctatcagtaatcgaccttattcctaattaaatagagcaaatccccttattgggggtaagacatgaagatgccagaaaaacatgacctgttggccgccattctcgcggcaaaggaacaaggcatcggggcaatccttgcgtttgcaatggcgtaccttcgcggcagatataatggcggtgcgtttacaaaaacagtaatcgacgcaacgatgtgcgccattatcgcctggttcattcgtgaccttctcgacttcgccggactaagtagcaatctcgcttatataacgagcgtgtttatcggctacatcggtactgactcgattggttcgcttatcaaacgcttcgctgctaaaaaagccggagtagaagatggtagaaatcaataatcaacgtaaggcgttcctcgatatgctggcgtggtcggagggaactgataacggacgtcagaaaaccagaaatcatggttatgacgtcattgtaggcggagagctatttactgattactccgatcaccctcgcaaacttgtcacgctaaacccaaaactcaaatcaacaggcgccggacgctaccagcttctttcccgttggtgggatgcctaccgcaagcagcttggcctgaaagacttctctccgaaaagtcaggacgctgtggcattgcagcagattaaggagcgtggcgctttacctatgattgatcgtggtgatatccgtcaggcaatcgaccgttgcagcaatatctgggcttcactgccgggcgctggttatggtcagttcgagcataaggctgacagcctgattgcaaaattcaaagaagcgggcggaacggtcagagagattgatgtatgagcagagtcaccgcgattatctccgctctggttatctgcatcatcgtctgcctgtcatgggctgttaatcattaccgtgataacgccattacctacaaagcccagcgcgacaaaaatgccagagaactgaagctggcgaacgcggcaattactgacatgcagatgcgtcagcgtgatgttgctgcgctcgatgcaaaatacacgaaggagttagctgatgctaaagctgaaaatgatgctctgcgtgatgatgttgccgctggtcgtcgtcggttgcacatcaaagcagtctgtcagtcagtgcgtgaagccaccaccgcctccggcgtggataatgcagcctccccccgactggcagacaccgctgaacgggattatttcaccctcagagagaggctgatcactatgcaaaaacaactggaaggaacccagaagtatattaatgagcagtgcagatagagttgcccatatcgatgggcaactcatgcaattattgtgagcaatacacacgcgcttccagcggagtataaatgcctaaagtaataaaaccgagcaatccatttacgaatgtttgctgggtttctgttttaacaacattttctgcgccgccacaaattttggctgcatcgacagttttcttctgcccaattccagaaacgaagaaatgatgggtgatggtttcctttggtgctactgctgccggtttgttttgaacagtaaacgtctgttgagcacatcctgtaataagcagggccagcgcagtagcgagtagcatttttttcatggtgttattcccgatgctttttgaagttcgcagaatcgtatgtgtagaaaattaaacaaaccctaaacaatgagttgaaatttcatattgttaatatttattaatgtatgtcaggtgcgatgaatcgtcattgtattcccggattaactatgtccacagccctgacggggaacttctctgcgggagtgtccgggaataattaaaacgatgcacacagggtttagcgcgtacacgtattgcattatgccaacgccccggtgctgacacggaagaaaccggacgttatgatttagcgtggaaagatttgtgtagtgttctgaatgctctcagtaaatagtaatgaattatcaaaggtatagtaatatcttttatgttcatggatatttgtaacccatcggaaaactcctgctttagcaagattttccctgtattgctgaaatgtgatttctcttgatttcaacctatcataggacgtttctataagatgcgtgtttcttgagaatttaacatttacaacctttttaagtccttttattaacacggtgttatcgttttctaacacgatgtgaatattatctgtggctagatagtaaatataatgtgagacgttgtgacgtttgctagcctgtcagaccaagtttactcatatatactttagattgatttaaaacttcatttttaatttaaaaggatctaggtgaagatcctttttgataatctcatgaccaaaatcccttaacgtgagttttcgttccactgagcgtcagaccccgtagaaaagatcaaaggatcttcttgagatcctttttttctgcgcgtaatctgctgcttgcaaacaaaaaaaccaccgctaccagcggtggtttgtttgccggatcaagagctaccaactctttttccgaaggtaactggcttcagcagagcgcagataccaaatactgttcttctagtgtagccgtagttaggccaccacttcaagaactctgtagcaccgcctacatacctcgctctgctaatcctgttaccagtggctgctgccagtggcgataagtcgtgtcttaccgggttggactcaagacgatagttaccggataaggcgcagcggtcgggctgaacggggggttcgtgcacacagcccagcttggagcgaacgacctacaccgaactgagatacctacagcgtgagctatgagaaagcgccacgcttcccgaagggagaaaggcggacaggtatccggtaagcggcagggtcggaacaggagagcgcacgagggagcttccagggggaaacgcctggtatctttatagtcctgtcgggtttcgccacctctgacttgagcgtcgatttttgtgatgctcgtcaggggggcggagcctatggaaaaacgccagcaacgcggcctttttacggttcctggccttttgctggccttttgctcacatgttctttcctgcgttatcccctgattctgtggataaccgtattaccgcctttgagtgagctgataccgctcgccgcagccgaacgaccgagcgcagcgagtcagtgagcgaggaagcggaagagcgcccaatacgcaaaccgcctctccccgcgcgttggccgattcattaatgcagctggcacgacaggtttcccgactggaaagcgggcagtgagcgcaacgcaattaatgtgagttagctcactcattaggcaccccaggctttacactttatgcttccggctcgtatgttgtgtggaattgtgagcggataacaatttcacacaggaaacagctatgaccatgattacgccaagtttgcacgcctgccgttcgacgatttcgcgagttggttcagctgctgcctgaggctggacgacctcgcggagttctaccggcagtgcaaatccgtcggcatccaggaaaccagcagcggctatccgcgcatccatgcccccgaactgcaggagtggggaggcacgatggccgctttggtccggatctttgtgaaggaaccttacttctgtggtgtgacataattggacaaactacctacagagatttaaagctctaaggtaaatataaaatttttaagtgtataatgtgttaaactactgattctaattgtttgtgtattttagattccaacctatggaactgatgaatgggagcagtggtggaatgcctttaatgaggaaaacctgttttgctcagaagaaatgccatctagtgatgatgaggctactgctgactctcaacattctactcctccaaaaaagaagagaaaggtagaagaccccaaggactttccttcagaattgctaagttttttgagtcatgctgtgtttagtaatagaactcttgcttgctttgctatttacaccacaaaggaaaaagctgcactgctatacaagaaaattatggaaaaatattctgtaacctttataagtaggcataacagttataatcataacatactgttttttcttactccacacaggcatagagtgt

SEQ ID NO: 69 - DNA, 9209 bp, synthetic construct
  source 1..9209: mol_type = other DNA
ctgctattaataactatgctcaaaaattgtgtacctttagctttttaatttgtaaaggggttaataaggaatatttgatgtatagtgccttgactagagatcataatcagccataccacatttgtagaggttttacttgctttaaaaaacctcccacacctccccctgaacctgaaacataaaatgaatgcaattgttgttgttctagcttggccactccctctctgcgcgctcgctcgctcactgaggccgggcgaccaaaggtcgcccgacgcccgggctttgcccgggcggcctcagtgagcgagcgagcgcgcagagagggagtggccaactccatcactaggggttcctctcgaggcggccgcccctaaaatgggcaaacattgcaagcagcaaacagcaaacacacagccctccctgcctgctgaccttggagctggggcagaggtcagagacctctctgggcccatgccacctccaacatccactcgaccccttggaatttcggtggagaggagcagaggttgtcctggcgtggtttaggtagtgtgagaggggaatgactcctttcggtaagtgcagtggaagctgtacactgcccaggcaaagcgtccgggcagcgtaggcgggcgactcagatcccagccagtggacttagcccctgtttgctcctccgataactggggtgaccttggttaatattcaccagcagcctcccccgttgcccctctggatccactgcttaaatacggacgaggacagggccctgtctcctcagcttcaggcaccaccactgacctgggacagtgaatccggactctaaggtaaatataaaatttttaagtgtataatgtgttaaactactgattctaattgtttctctcttttagattccaacctttggaactgaattctagagccaccatgtccactgcggtcctggaaaacccaggcttgggcaggaaactctctgactttggacaggaaacaagctatattgaagacaactgcaatcaaaatggtgccatatcactgatcttctcactcaaagaagaagttggtgcattggccaaagtattgcgcttatttgaggagaatgatgtaaacctgacccacattgaatctagaccttctcgtttaaagaaagatgagtatgaatttttcacccatttggataaacgtagcctgcctgctctgacaaacatcatcaagatcttgaggcatgacattggtgccactgtccatgagctttcacgagataagaagaaagacacagtgccctggttcccaagaaccattcaagagctggacagatttgccaatcagattctcagctatggagcggaactggatgctgaccaccctggttttaaagatcctgtgtaccgtgcaagacggaagcagtttgctgacattgcctacaactaccgccatgggcagcccatccctcgagtggaatacatggaggaagaaaagaaaacatggggcacagtgttcaagactctgaagtccttgtataaaacccatgcttgctatgagtacaatcacatttttccacttcttgaaaagtactgtggcttccatgaagataacattccccagctggaagacgtttctcagttcctgcagacttgcactggtttccgcctccgacctgtggctggcctgctttcctctcgggatttcttgggtggcctggccttccgagtcttccactgcacacagtacatcagacatggatccaagcccatgtatacccccgaacctgacatctgccatgagctgttgggacatgtgcccttgttttcagatcgcagctttgcccagttttcccaggaaattggccttgcctctctgggtgcacctgatgaatacattgaaaagctcgccacaatttactggtttactgtggagtttgggctctgcaaacaaggagactccataaaggcatatggtgctgggctcctgtcatcctttggtgaattacagtactgcttatcagagaagccaaagcttctccccctggagctggagaagacagccatccaaaattacactgtcacggagttccagcccctctattacgtggcagagagttttaatgatgccaaggagaaagtaaggaactttgctgccacaatacctcggcccttctcagttcgctacgacccatacacccaaaggattgaggtcttggacaatacccagcagcttaagattttggctgattccattaacagtgaaattggaatcctttgcagtgccctccagaaaataaagtaaagatctgcctcgactgtgccttctagttgccagccatctgttgtttgcccctcccccgtgccttccttgaccctggaaggtgccactcccactgtcctttcctaataaaatgaggaaattgcatcgcattgtctgagtaggtgtcattctattctggggggtggggtggggcaggacagcaagggggaggattgggaagacaatagcaggcatgctggggatgcggtgggctctatggatcccctaactacaaggaacccctagtgatggagttggccactccctctctgcgcgctcgctcgctcactgaggccgggcgaccaaaggtcgcccgacgcccgggctttgcccgggcggcctcagtgagcgagcgagcgcgcagagagggagtggccaacaggaagctcctctgtgtcctcataaaccctaacctcctctacttgagaggacattccaatcataggctgcccatccaccctctgtgtcctcctgttaattaggtcacttaacaaaaaggaaattgggtaggggtttttcacagaccgctttctaagggtaattttaaaatatctgggaagtcccttccactgctgtgttccagaagtgttggtaaacagcccacaaatgtcaacagcagaaacatacaagctgtcagctttgcacaagggcccaatctctggaagatccgcgcgtaccgagttctaattcactggccgtcgttttacaacgtcgtgactgggaaaaccctggcgttacccaacttaatcgccttgcagcacatccccctttcgccagctggcgtaatagcgaagaggcccgcaccgatcgcccttcccaacagttgcgcagcctgaatggcgaatggcgcctgatgcggtattttctccttacgcatctgtgcggtatttcacaccgcatatggtgcactctcagtacaatctgctctgatgccgcatagttaagccagccccgacacccgccaacacccgctgacgcgccctgacgggcttgtctgctcccggcatccgcttacagacaagctgtgaccgtctccgggagctgcatgtgtcagaggttttcaccgtcatcaccgaaacgcgcgagacgaaagggcctcgtgatacgcctatttttataggttaatgtcatgataataatggtttcttagacgtcaggtggcacttttcggggaaatgtgcgcggaacccccatttgtttatttttctaaatacattcaaatatgtatccgctcatgagacaataaccctgataaatgcttcaataatattgaaaaaggaagagtatgagccatattcaacgggaaacgtcttgctctaggccgcgattaaattccaacatggatgctgatttatatgggtataaatgggctcgcgataatgtcgggcaatcaggtgcgacaatctatcgattgtatgggaagcccgatgcgccagagttgtttctgaaacatggcaaaggtagcgttgccaatgatgttacagatgagatggtcagactaaactggctgacggaatttatgcctcttccgaccatcaagcattttatccgtactcctgatgatgcatggttactcaccactgcgatccctgggaaaacagcattccaggtattagaagaatatcctgattcaggtgaaaatattgttgatgcgctggcagtgttcctgcgccggttgcattcgattcctgtttgtaattgtccttttaacagcgatcgcgtatttcgtctcgctcaggcgcaatcacgaatgaataacggtttggttgatgcgagtgattttgatgacgagcgtaatggctggcctgttgaacaagtctggaaagaaatgcataaacttttgccattctcaccggattcagtcgtcactcatggtgatttctcacttgataaccttatttttgacgaggggaaattaataggttgtattgatgttggacgagtcggaatcgcagaccgataccaggatcttgccatcctatggaactgcctcggtgagttttctccttcattacagaaacggctttttcaaaaatatggtattgataatcctgatatgaataaattgcagtttcatttgatgctcgatgagtttttctaaaagcttgtgcaatgccacaaagaagagtcaatcgcagacaacattttgaatgcggtcacacgttagcagcatgattgccacggatggcaacatattaacggcatgatattgacttattgaataaaattgggtaaatttgactcaacgatgggttaattcgctcgttgtggtagtgagatgaaaagaggcggcgcttactaccgattccgcctagttggtcacttcgacgtatcgtctggaactccaaccatcgcaggcagagaggtctgcaaaatgcaatcccgaaacagttcgcaggtaatagttagagcctgcataacggtttcgggattttttatatctgcacaacaggtaagagcattgagtcgataatcgtgaagagtcggcgagcctggttagccagtgctctttccgttgtgctgaattaagcgaataccggaagcagaaccggatcaccaaatgcgtacaggcgtcatcgccgcccagcaacagcacaacccaaactgagccgtagccactgtctgtcctgaattcattagtaatagttacgctgcggccttttacacatgaccttcgtgaaagcgggtggcaggaggtcgcgctaacaacctcctgccgttttgcccgtgcatatcggtcacgaacaaatctgattactaaacacagtagcctggatttgttctatcagtaatcgaccttattcctaattaaatagagcaaatccccttattgggggtaagacatgaagatgccagaaaaacatgacctgttggccgccattctcgcggcaaaggaacaaggcatcggggcaatccttgcgtttgcaatggcgtaccttcgcggcagatataatggcggtgcgtttacaaaaacagtaatcgacgcaacgatgtgcgccattatcgcctggttcattcgtgaccttctcgacttcgccggactaagtagcaatctcgcttatataacgagcgtgtttatcggctacatcggtactgactcgattggttcgcttatcaaacgcttcgctgctaaaaaagccggagtagaagatggtagaaatcaataatcaacgtaaggcgttcctcgatatgctggcgtggtcggagggaactgataacggacgtcagaaaaccagaaatcatggttatgacgtcattgtaggcggagagctatttactgattactccgatcaccctcgcaaacttgtcacgctaaacccaaaactcaaatcaacaggcgccggacgctaccagcttctttcccgttggtgggatgcctaccgcaagcagcttggcctgaaagacttctctccgaaaagtcaggacgctgtggcattgcagcagattaaggagcgtggcgctttacctatgattgatcgtggtgatatccgtcaggcaatcgaccgttgcagcaatatctgggcttcactgccgggcgctggttatggtcagttcgagcataaggctgacagcctgattgcaaaattcaaagaagcgggcggaacggtcagagagattgatgtatgagcagagtcaccgcgattatctccgctctggttatctgcatcatcgtctgcctgtcatgggctgttaatcattaccgtgataacgccattacctacaaagcccagcgcgacaaaaatgccagagaactgaagctggcgaacgcggcaattactgacatgcagatgcgtcagcgtgatgttgctgcgctcgatgcaaaatacacgaaggagttagctgatgctaaagctgaaaatgatgctctgcgtgatgatgttgccgctggtcgtcgtcggttgcacatcaaagcagtctgtcagtcagtgcgtgaagccaccaccgcctccggcgtggataatgcagcctccccccgactggcagacaccgctgaacgggattatttcaccctcagagagaggctgatcactatgcaaaaacaactggaaggaacccagaagtatattaatgagcagtgcagatagagttgcccatatcgatgggcaactcatgcaattattgtgagcaatacacacgcgcttccagcggagtataaatgcctaaagtaataaaaccgagcaatccatttacgaatgtttgctgggtttctgttttaacaacattttctgcgccgccacaaattttggctgcatcgacagttttcttctgcccaattccagaaacgaagaaatgatgggtgatggtttcctttggtgctactgctgccggtttgttttgaacagtaaacgtctgttgagcacatcctgtaataagcagggccagcgcagtagcgagtagcatttttttcatggtgttattcccgatgctttttgaagttcgcagaatcgtatgtgtagaaaattaaacaaaccctaaacaatgagttgaaatttcatattgttaatatttattaatgtatgtcaggtgcgatgaatcgtcattgtattcccggattaactatgtccacagccctgacggggaacttctctgcgggagtgtccgggaataattaaaacgatgcacacagggtttagcgcgtacacgtattgcattatgccaacgccccggtgctgacacggaagaaaccggacgttatgatttagcgtggaaagatttgtgtagtgttctgaatgctctcagtaaatagtaatgaattatcaaaggtatagtaatatcttttatgttcatggatatttgtaacccatcggaaaactcctgctttagcaagattttccctgtattgctgaaatgtgatttctcttgatttcaacctatcataggacgtttctataagatgcgtgtttcttgagaatttaacatttacaacctttttaagtccttttattaacacggtgttatcgttttctaacacgatgtgaatattatctgtggctagatagtaaatataatgtgagacgttgtgacgtttgctagcctgtcagaccaagtttactcatatatactttagattgatttaaaacttcatttttaatttaaaaggatctaggtgaagatcctttttgataatctcatgaccaaaatcccttaacgtgagttttcgttccactgagcgtcagaccccgtagaaaagatcaaaggatcttcttgagatcctttttttctgcgcgtaatctgctgcttgcaaacaaaaaaaccaccgctaccagcggtggtttgtttgccggatcaagagctaccaactctttttccgaaggtaactggcttcagcagagcgcagataccaaatactgttcttctagtgtagccgtagttaggccaccacttcaagaactctgtagcaccgcctacatacctcgctctgctaatcctgttaccagtggctgctgccagtggcgataagtcgtgtcttaccgggttggactcaagacgatagttaccggataaggcgcagcggtcgggctgaacggggggttcgtgcacacagcccagcttggagcgaacgacctacaccgaactgagatacctacagcgtgagctatgagaaagcgccacgcttcccgaagggagaaaggcggacaggtatccggtaagcggcagggtcggaacaggagagcgcacgagggagcttccagggggaaacgcctggtatctttatagtcctgtcgggtttcgccacctctgacttgagcgtcgatttttgtgatgctcgtcaggggggcggagcctatggaaaaacgccagcaacgcggcctttttacggttcctggccttttgctggccttttgctcacatgttctttcctgcgttatcccctgattctgtggataaccgtattaccgcctttgagtgagctgataccgctcgccgcagccgaacgaccgagcgcagcgagtcagtgagcgaggaagcggaagagcgcccaatacgcaaaccgcctctccccgcgcgttggccgattcattaatgcagctggcacgacaggtttcccgactggaaagcgggcagtgagcgcaacgcaattaatgtgagttagctcactcattaggcaccccaggctttacactttatgcttccggctcgtatgttgtgtggaattgtgagcggataacaatttcacacaggaaacagctatgaccatgattacgccaagtttgcacgcctgccgttcgacgatttcgcgagttggttcagctgctgcctgaggctggacgacctcgcggagttctaccggcagtgcaaatccgtcggcatccaggaaaccagcagcggctatccgcgcatccatgcccccgaactgcaggagtggggaggcacgatggccgctttggtccggatctttgtgaaggaaccttacttctgtggtgtgacataattggacaaactacctacagagatttaaagctctaaggtaaatataaaatttttaagtgtataatgtgttaaactactgattctaattgtttgtgtattttagattccaacctatggaactgatgaatgggagcagtggtggaatgcctttaatgaggaaaacctgttttgctcagaagaaatgccatctagtgatgatgaggctactgctgactctcaacattctactcctccaaaaaagaagagaaaggtagaagaccccaaggactttccttcagaattgctaagttttttgagtcatgctgtgtttagtaatagaactcttgcttgctttgctatttacaccacaaaggaaaaagctgcactgctatacaagaaaattatggaaaaatattctgtaacctttataagtaggcataacagttataatcataacatactgttttttcttactccacacaggcatagagtgt

SEQ ID NO: 70 - DNA, 9061 bp, synthetic construct
  source 1..9061: mol_type = other DNA
ctgctattaataactatgctcaaaaattgtgtacctttagctttttaatttgtaaaggggttaataaggaatatttgatgtatagtgccttgactagagatcataatcagccataccacatttgtagaggttttacttgctttaaaaaacctcccacacctccccctgaacctgaaacataaaatgaatgcaattgttgttgttctagcttggccactccctctctgcgcgctcgctcgctcactgaggccgggcgaccaaaggtcgcccgacgcccgggctttgcccgggcggcctcagtgagcgagcgagcgcgcagagagggagtggccaactccatcactaggggttcctctcgaggcggccgcgggggaggctgctggtgaatattaaccaagatcaccccagttaccggaggagcaaacagggactaagttcacacgcgtggtaccgtctgtctgcacatttcgtagagcgagtgttccgatactctaatctccctaggcaaggttcatatttgtgtaggttacttattctccttttgttgactaagtcaataatcagaatcagcaggtttggagtcagcttggcagggatcagcagcctgggttggaaggagggggtataaaagccccttcaccaggagaagccctcacacagatccacaagctcctgaagaggtaagggtttaagttatcgttagttcgtgcaccattaatgtttaattacctggagcacctgcctgaaatcatttttttttcaggttggctagtgccaccatgtccactgcggtcctggaaaacccaggcttgggcaggaaactctctgactttggacaggaaacaagctatattgaagacaactgcaatcaaaatggtgccatatcactgatcttctcactcaaagaagaagttggtgcattggccaaagtattgcgcttatttgaggagaatgatgtaaacctgacccacattgaatctagaccttctcgtttaaagaaagatgagtatgaatttttcacccatttggataaacgtagcctgcctgctctgacaaacatcatcaagatcttgaggcatgacattggtgccactgtccatgagctttcacgagataagaagaaagacacagtgccctggttcccaagaaccattcaagagctggacagatttgccaatcagattctcagctatggagcggaactggatgctgaccaccctggttttaaagatcctgtgtaccgtgcaagacggaagcagtttgctgacattgcctacaactaccgccatgggcagcccatccctcgagtggaatacatggaggaagaaaagaaaacatggggcacagtgttcaagactctgaagtccttgtataaaacccatgcttgctatgagtacaatcacatttttccacttcttgaaaagtactgtggcttccatgaagataacattccccagctggaagacgtttctcagttcctgcagacttgcactggtttccgcctccgacctgtggctggcctgctttcctctcgggatttcttgggtggcctggccttccgagtcttccactgcacacagtacatcagacatggatccaagcccatgtatacccccgaacctgacatctgccatgagctgttgggacatgtgcccttgttttcagatcgcagctttgcccagttttcccaggaaattggccttgcctctctgggtgcacctgatgaatacattgaaaagctcgccacaatttactggtttactgtggagtttgggctctgcaaacaaggagactccataaaggcatatggtgctgggctcctgtcatcctttggtgaattacagtactgcttatcagagaagccaaagcttctccccctggagctggagaagacagccatccaaaattacactgtcacggagttccagcccctctattacgtggcagagagttttaatgatgccaaggagaaagtaaggaactttgctgccacaatacctcggcccttctcagttcgctacgacccatacacccaaaggattgaggtcttggacaatacccagcagcttaagattttggctgattccattaacagtgaaattggaatcctttgcagtgccctccagaaaataaagtaaagatctgcctcgactgtgccttctagttgccagccatctgttgtttgcccctcccccgtgccttccttgaccctggaaggtgccactcccactgtcctttcctaataaaatgaggaaattgcatcgcattgtctgagtaggtgtcattctattctggggggtggggtggggcaggacagcaagggggaggattgggaagacaatagcaggcatgctggggatgcggtgggctctatggatcccctaactacaaggaacccctagtgatggagttggccactccctctctgcgcgctcgctcgctcactgaggccgggcgaccaaaggtcgcccgacgcccgggctttgcccgggcggcctcagtgagcgagcgagcgcgcagagagggagtggccaacaggaagctcctctgtgtcctcataaaccctaacctcctctacttgagaggacattccaatcataggctgcccatccaccctctgtgtcctcctgttaattaggtcacttaacaaaaaggaaattgggtaggggtttttcacagaccgctttctaagggtaattttaaaatatctgggaagtcccttccactgctgtgttccagaagtgttggtaaacagcccacaaatgtcaacagcagaaacatacaagctgtcagctttgcacaagggcccaatctctggaagatccgcgcgtaccgagttctaattcactggccgtcgttttacaacgtcgtgactgggaaaaccctggcgttacccaacttaatcgccttgcagcacatccccctttcgccagctggcgtaatagcgaagaggcccgcaccgatcgcccttcccaacagttgcgcagcctgaatggcgaatggcgcctgatgcggtattttctccttacgcatctgtgcggtatttcacaccgcatatggtgcactctcagtacaatctgctctgatgccgcatagttaagccagccccgacacccgccaacacccgctgacgcgccctgacgggcttgtctgctcccggcatccgcttacagacaagctgtgaccgtctccgggagctgcatgtgtcagaggttttcaccgtcatcaccgaaacgcgcgagacgaaagggcctcgtgatacgcctatttttataggttaatgtcatgataataatggtttcttagacgtcaggtggcacttttcggggaaatgtgcgcggaacccccatttgtttatttttctaaatacattcaaatatgtatccgctcatgagacaataaccctgataaatgcttcaataatattgaaaaaggaagagtatgagccatattcaacgggaaacgtcttgctctaggccgcgattaaattccaacatggatgctgatttatatgggtataaatgggctcgcgataatgtcgggcaatcaggtgcgacaatctatcgattgtatgggaagcccgatgcgccagagttgtttctgaaacatggcaaaggtagcgttgccaatgatgttacagatgagatggtcagactaaactggctgacggaatttatgcctcttccgaccatcaagcattttatccgtactcctgatgatgcatggttactcaccactgcgatccctgggaaaacagcattccaggtattagaagaatatcctgattcaggtgaaaatattgttgatgcgctggcagtgttcctgcgccggttgcattcgattcctgtttgtaattgtccttttaacagcgatcgcgtatttcgtctcgctcaggcgcaatcacgaatgaataacggtttggttgatgcgagtgattttgatgacgagcgtaatggctggcctgttgaacaagtctggaaagaaatgcataaacttttgccattctcaccggattcagtcgtcactcatggtgatttctcacttgataaccttatttttgacgaggggaaattaataggttgtattgatgttggacgagtcggaatcgcagaccgataccaggatcttgccatcctatggaactgcctcggtgagttttctccttcattacagaaacggctttttcaaaaatatggtattgataatcctgatatgaataaattgcagtttcatttgatgctcgatgagtttttctaaaagcttgtgcaatgccacaaagaagagtcaatcgcagacaacattttgaatgcggtcacacgttagcagcatgattgccacggatggcaacatattaacggcatgatattgacttattgaataaaattgggtaaatttgactcaacgatgggttaattcgctcgttgtggtagtgagatgaaaagaggcggcgcttactaccgattccgcctagttggtcacttcgacgtatcgtctggaactccaaccatcgcaggcagagaggtctgcaaaatgcaatcccgaaacagttcgcaggtaatagttagagcctgcataacggtttcgggattttttatatctgcacaacaggtaagagcattgagtcgataatcgtgaagagtcggcgagcctggttagccagtgctctttccgttgtgctgaattaagcgaataccggaagcagaaccggatcaccaaatgcgtacaggcgtcatcgccgcccagcaacagcacaacccaaactgagccgtagccactgtctgtcctgaattcattagtaatagttacgctgcggccttttacacatgaccttcgtgaaagcgggtggcaggaggtcgcgctaacaacctcctgccgttttgcccgtgcatatcggtcacgaacaaatctgattactaaacacagtagcctggatttgttctatcagtaatcgaccttattcctaattaaatagagcaaatccccttattgggggtaagacatgaagatgccagaaaaacatgacctgttggccgccattctcgcggcaaaggaacaaggcatcggggcaatccttgcgtttgcaatggcgtaccttcgcggcagatataatggcggtgcgtttacaaaaacagtaatcgacgcaacgatgtgcgccattatcgcctggttcattcgtgaccttctcgacttcgccggactaagtagcaatctcgcttatataacgagcgtgtttatcggctacatcggtactgactcgattggttcgcttatcaaacgcttcgctgctaaaaaagccggagtagaagatggtagaaatcaataatcaacgtaaggcgttcctcgatatgctggcgtggtcggagggaactgataacggacgtcagaaaaccagaaatcatggttatgacgtcattgtaggcggagagctatttactgattactccgatcaccctcgcaaacttgtcacgctaaacccaaaactcaaatcaacaggcgccggacgctaccagcttctttcccgttggtgggatgcctaccgcaagcagcttggcctgaaagacttctctccgaaaagtcaggacgctgtggcattgcagcagattaaggagcgtggcgctttacctatgattgatcgtggtgatatccgtcaggcaatcgaccgttgcagcaatatctgggcttcactgccgggcgctggttatggtcagttcgagcataaggctgacagcctgattgcaaaattcaaagaagcgggcggaacggtcagagagattgatgtatgagcagagtcaccgcgattatctccgctctggttatctgcatcatcgtctgcctgtcatgggctgttaatcattaccgtgataacgccattacctacaaagcccagcgcgacaaaaatgccagagaactgaagctggcgaacgcggcaattactgacatgcagatgcgtcagcgtgatgttgctgcgctcgatgcaaaatacacgaaggagttagctgatgctaaagctgaaaatgatgctctgcgtgatgatgttgccgctggtcgtcgtcggttgcacatcaaagcagtctgtcagtcagtgcgtgaagccaccaccgcctccggcgtggataatgcagcctccccccgactggcagacaccgctgaacgggattatttcaccctcagagagaggctgatcactatgcaaaaacaactggaaggaacccagaagtatattaatgagcagtgcagatagagttgcccatatcgatgggcaactcatgcaattattgtgagcaatacacacgcgcttccagcggagtataaatgcctaaagtaataaaaccgagcaatccatttacgaatgtttgctgggtttctgttttaacaacattttctgcgccgccacaaattttggctgcatcgacagttttcttctgcccaattccagaaacgaagaaatgatgggtgatggtttcctttggtgctactgctgccggtttgttttgaacagtaaacgtctgttgagcacatcctgtaataagcagggccagcgcagtagcgagtagcatttttttcatggtgttattcccgatgctttttgaagttcgcagaatcgtatgtgtagaaaattaaacaaaccctaaacaatgagttgaaatttcatattgttaatatttattaatgtatgtcaggtgcgatgaatcgtcattgtattcccggattaactatgtccacagccctgacggggaacttctctgcgggagtgtccgggaataattaaaacgatgcacacagggtttagcgcgtacacgtattgcattatgccaacgccccggtgctgacacggaagaaaccggacgttatgatttagcgtggaaagatttgtgtagtgttctgaatgctctcagtaaatagtaatgaattatcaaaggtatagtaatatcttttatgttcatggatatttgtaacccatcggaaaactcctgctttagcaagattttccctgtattgctgaaatgtgatttctcttgatttcaacctatcataggacgtttctataagatgcgtgtttcttgagaatttaacatttacaacctttttaagtccttttattaacacggtgttatcgttttctaacacgatgtgaatattatctgtggctagatagtaaatataatgtgagacgttgtgacgtttgctagcctgtcagaccaagtttactcatatatactttagattgatttaaaacttcatttttaatttaaaaggatctaggtgaagatcctttttgataatctcatgaccaaaatcccttaacgtgagttttcgttccactgagcgtcagaccccgtagaaaagatcaaaggatcttcttgagatcctttttttctgcgcgtaatctgctgcttgcaaacaaaaaaaccaccgctaccagcggtggtttgtttgccggatcaagagctaccaactctttttccgaaggtaactggcttcagcagagcgcagataccaaatactgttcttctagtgtagccgtagttaggccaccacttcaagaactctgtagcaccgcctacatacctcgctctgctaatcctgttaccagtggctgctgccagtggcgataagtcgtgtcttaccgggttggactcaagacgatagttaccggataaggcgcagcggtcgggctgaacggggggttcgtgcacacagcccagcttggagcgaacgacctacaccgaactgagatacctacagcgtgagctatgagaaagcgccacgcttcccgaagggagaaaggcggacaggtatccggtaagcggcagggtcggaacaggagagcgcacgagggagcttccagggggaaacgcctggtatctttatagtcctgtcgggtttcgccacctctgacttgagcgtcgatttttgtgatgctcgtcaggggggcggagcctatggaaaaacgccagcaacgcggcctttttacggttcctggccttttgctggccttttgctcacatgttctttcctgcgttatcccctgattctgtggataaccgtattaccgcctttgagtgagctgataccgctcgccgcagccgaacgaccgagcgcagcgagtcagtgagcgaggaagcggaagagcgcccaatacgcaaaccgcctctccccgcgcgttggccgattcattaatgcagctggcacgacaggtttcccgactggaaagcgggcagtgagcgcaacgcaattaatgtgagttagctcactcattaggcaccccaggctttacactttatgcttccggctcgtatgttgtgtggaattgtgagcggataacaatttcacacaggaaacagctatgaccatgattacgccaagtttgcacgcctgccgttcgacgatttcgcgagttggttcagctgctgcctgaggctggacgacctcgcggagttctaccggcagtgcaaatccgtcggcatccaggaaaccagcagcggctatccgcgcatccatgcccccgaactgcaggagtggggaggcacgatggccgctttggtccggatctttgtgaaggaaccttacttctgtggtgtgacataattggacaaactacctacagagatttaaagctctaaggtaaatataaaatttttaagtgtataatgtgttaaactactgattctaattgtttgtgtattttagattccaacctatggaactgatgaatgggagcagtggtggaatgcctttaatgaggaaaacctgttttgctcagaagaaatgccatctagtgatgatgaggctactgctgactctcaacattctactcctccaaaaaagaagagaaaggtagaagaccccaaggactttccttcagaattgctaagttttttgagtcatgctgtgtttagtaatagaactcttgcttgctttgctatttacaccacaaaggaaaaagctgcactgctatacaagaaaattatggaaaaatattctgtaacctttataagtaggcataacagttataatcataacatactgttttttcttactccacacaggcatagagtgt

SEQ ID NO: 71 - DNA, 9152 bp, synthetic construct
  source 1..9152: mol_type = other DNA
ctgctattaataactatgctcaaaaattgtgtacctttagctttttaatttgtaaaggggttaataaggaatatttgatgtatagtgccttgactagagatcataatcagccataccacatttgtagaggttttacttgctttaaaaaacctcccacacctccccctgaacctgaaacataaaatgaatgcaattgttgttgttctagcttggccactccctctctgcgcgctcgctcgctcactgaggccgggcgaccaaaggtcgcccgacgcccgggctttgcccgggcggcctcagtgagcgagcgagcgcgcagagagggagtggccaactccatcactaggggttcctctcgaggcggccgcgcactgggaggatgttgagtaagatggaaaactactgatgacccttgcagagacagagtattaggacatgtttgaacaggggccgggcgatcagcaggtagctctagaggatccccgtctgtctgcacatttcgtagagcgagtgttccgatactctaatctccctaggcaaggttcatatttgtgtaggttacttattctccttttgttgactaagtcaataatcagaatcagcaggtttggagtcagcttggcagggatcagcagcctgggttggaaggagggggtataaaagccccttcaccaggagaagccgtcacacagatccacaagctcctgacaggaagctgatcctctaggtgactctcttaaggtagccttgcagaagttggtcgtgaggcactggctagccctaaggtaagttggcgccgtttaagggatggttggttggtggggtattaatgtttaattaccttttttacaggcctgaagatctgccaccatgtccactgcggtcctggaaaacccaggcttgggcaggaaactctctgactttggacaggaaacaagctatattgaagacaactgcaatcaaaatggtgccatatcactgatcttctcactcaaagaagaagttggtgcattggccaaagtattgcgcttatttgaggagaatgatgtaaacctgacccacattgaatctagaccttctcgtttaaagaaagatgagtatgaatttttcacccatttggataaacgtagcctgcctgctctgacaaacatcatcaagatcttgaggcatgacattggtgccactgtccatgagctttcacgagataagaagaaagacacagtgccctggttcccaagaaccattcaagagctggacagatttgccaatcagattctcagctatggagcggaactggatgctgaccaccctggttttaaagatcctgtgtaccgtgcaagacggaagcagtttgctgacattgcctacaactaccgccatgggcagcccatccctcgagtggaatacatggaggaagaaaagaaaacatggggcacagtgttcaagactctgaagtccttgtataaaacccatgcttgctatgagtacaatcacatttttccacttcttgaaaagtactgtggcttccatgaagataacattccccagctggaagacgtttctcagttcctgcagacttgcactggtttccgcctccgacctgtggctggcctgctttcctctcgggatttcttgggtggcctggccttccgagtcttccactgcacacagtacatcagacatggatccaagcccatgtatacccccgaacctgacatctgccatgagctgttgggacatgtgcccttgttttcagatcgcagctttgcccagttttcccaggaaattggccttgcctctctgggtgcacctgatgaatacattgaaaagctcgccacaatttactggtttactgtggagtttgggctctgcaaacaaggagactccataaaggcatatggtgctgggctcctgtcatcctttggtgaattacagtactgcttatcagagaagccaaagcttctccccctggagctggagaagacagccatccaaaattacactgtcacggagttccagcccctctattacgtggcagagagttttaatgatgccaaggagaaagtaaggaactttgctgccacaatacctcggcccttctcagttcgctacgacccatacacccaaaggattgaggtcttggacaatacccagcagcttaagattttggctgattccattaacagtgaaattggaatcctttgcagtgccctccagaaaataaagtaaagatctgcctcgactgtgccttctagttgccagccatctgttgtttgcccctcccccgtgccttccttgaccctggaaggtgccactcccactgtcctttcctaataaaatgaggaaattgcatcgcattgtctgagtaggtgtcattctattctggggggtggggtggggcaggacagcaagggggaggattgggaagacaatagcaggcatgctggggatgcggtgggctctatggatcccctaactacaaggaacccctagtgatggagttggccactccctctctgcgcgctcgctcgctcactgaggccgggcgaccaaaggtcgcccgacgcccgggctttgcccgggcggcctcagtgagcgagcgagcgcgcagagagggagtggccaacaggaagctcctctgtgtcctcataaaccctaacctcctctacttgagaggacattccaatcataggctgcccatccaccctctgtgtcctcctgttaattaggtcacttaacaaaaaggaaattgggtaggggtttttcacagaccgctttctaagggtaattttaaaatatctgggaagtcccttccactgctgtgttccagaagtgttggtaaacagcccacaaatgtcaacagcagaaacatacaagctgtcagctttgcacaagggcccaatctctggaagatccgcgcgtaccgagttctaattcactggccgtcgttttacaacgtcgtgactgggaaaaccctggcgttacccaacttaatcgccttgcagcacatccccctttcgccagctggcgtaatagcgaagaggcccgcaccgatcgcccttcccaacagttgcgcagcctgaatggcgaatggcgcctgatgcggtattttctccttacgcatctgtgcggtatttcacaccgcatatggtgcactctcagtacaatctgctctgatgccgcatagttaagccagccccgacacccgccaacacccgctgacgcgccctgacgggcttgtctgctcccggcatccgcttacagacaagctgtgaccgtctccgggagctgcatgtgtcagaggttttcaccgtcatcaccgaaacgcgcgagacgaaagggcctcgtgatacgcctatttttataggttaatgtcatgataataatggtttcttagacgtcaggtggcacttttcggggaaatgtgcgcggaacccccatttgtttatttttctaaatacattcaaatatgtatccgctcatgagacaataaccctgataaatgcttcaataatattgaaaaaggaagagtatgagccatattcaacgggaaacgtcttgctctaggccgcgattaaattccaacatggatgctgatttatatgggtataaatgggctcgcgataatgtcgggcaatcaggtgcgacaatctatcgattgtatgggaagcccgatgcgccagagttgtttctgaaacatggcaaaggtagcgttgccaatgatgttacagatgagatggtcagactaaactggctgacggaatttatgcctcttccgaccatcaagcattttatccgtactcctgatgatgcatggttactcaccactgcgatccctgggaaaacagcattccaggtattagaagaatatcctgattcaggtgaaaatattgttgatgcgctggcagtgttcctgcgccggttgcattcgattcctgtttgtaattgtccttttaacagcgatcgcgtatttcgtctcgctcaggcgcaatcacgaatgaataacggtttggttgatgcgagtgattttgatgacgagcgtaatggctggcctgttgaacaagtctggaaagaaatgcataaacttttgccattctcaccggattcagtcgtcactcatggtgatttctcacttgataaccttatttttgacgaggggaaattaataggttgtattgatgttggacgagtcggaatcgcagaccgataccaggatcttgccatcctatggaactgcctcggtgagttttctccttcattacagaaacggctttttcaaaaatatggtattgataatcctgatatgaataaattgcagtttcatttgatgctcgatgagtttttctaaaagcttgtgcaatgccacaaagaagagtcaatcgcagacaacattttgaatgcggtcacacgttagcagcatgattgccacggatggcaacatattaacggcatgatattgacttattgaataaaattgggtaaatttgactcaacgatgggttaattcgctcgttgtggtagtgagatgaaaagaggcggcgcttactaccgattccgcctagttggtcacttcgacgtatcgtctggaactccaaccatcgcaggcagagaggtctgcaaaatgcaatcccgaaacagttcgcaggtaatagttagagcctgcataacggtttcgggattttttatatctgcacaacaggtaagagcattgagtcgataatcgtgaagagtcggcgagcctggttagccagtgctctttccgttgtgctgaattaagcgaataccggaagcagaaccggatcaccaaatgcgtacaggcgtcatcgccgcccagcaacagcacaacccaaactgagccgtagccactgtctgtcctgaattcattagtaatagttacgctgcggccttttacacatgaccttcgtgaaagcgggtggcaggaggtcgcgctaacaacctcctgccgttttgcccgtgcatatcggtcacgaacaaatctgattactaaacacagtagcctggatttgttctatcagtaatcgaccttattcctaattaaatagagcaaatccccttattgggggtaagacatgaagatgccagaaaaacatgacctgttggccgccattctcgcggcaaaggaacaaggcatcggggcaatccttgcgtttgcaatggcgtaccttcgcggcagatataatggcggtgcgtttacaaaaacagtaatcgacgcaacgatgtgcgccattatcgcctggttcattcgtgaccttctcgacttcgccggactaagtagcaatctcgcttatataacgagcgtgtttatcggctacatcggtactgactcgattggttcgcttatcaaacgcttcgctgctaaaaaagccggagtagaagatggtagaaatcaataatcaacgtaaggcgttcctcgatatgctggcgtggtcggagggaactgataacggacgtcagaaaaccagaaatcatggttatgacgtcattgtaggcggagagctatttactgattactccgatcaccctcgcaaacttgtcacgctaaacccaaaactcaaatcaacaggcgccggacgctaccagcttctttcccgttggtgggatgcctaccgcaagcagcttggcctgaaagacttctctccgaaaagtcaggacgctgtggcattgcagcagattaaggagcgtggcgctttacctatgattgatcgtggtgatatccgtcaggcaatcgaccgttgcagcaatatctgggcttcactgccgggcgctggttatggtcagttcgagcataaggctgacagcctgattgcaaaattcaaagaagcgggcggaacggtcagagagattgatgtatgagcagagtcaccgcgattatctccgctctggttatctgcatcatcgtctgcctgtcatgggctgttaatcattaccgtgataacgccattacctacaaagcccagcgcgacaaaaatgccagagaactgaagctggcgaacgcggcaattactgacatgcagatgcgtcagcgtgatgttgctgcgctcgatgcaaaatacacgaaggagttagctgatgctaaagctgaaaatgatgctctgcgtgatgatgttgccgctggtcgtcgtcggttgcacatcaaagcagtctgtcagtcagtgcgtgaagccaccaccgcctccggcgtggataatgcagcctccccccgactggcagacaccgctgaacgggattatttcaccctcagagagaggctgatcactatgcaaaaacaactggaaggaacccagaagtatattaatgagcagtgcagatagagttgcccatatcgatgggcaactcatgcaattattgtgagcaatacacacgcgcttccagcggagtataaatgcctaaagtaataaaaccgagcaatccatttacgaatgtttgctgggtttctgttttaacaacattttctgcgccgccacaaattttggctgcatcgacagttttcttctgcccaattccagaaacgaagaaatgatgggtgatggtttcctttggtgctactgctgccggtttgttttgaacagtaaacgtctgttgagcacatcctgtaataagcagggccagcgcagtagcgagtagcatttttttcatggtgttattcccgatgctttttgaagttcgcagaatcgtatgtgtagaaaattaaacaaaccctaaacaatgagttgaaatttcatattgttaatatttattaatgtatgtcaggtgcgatgaatcgtcattgtattcccggattaactatgtccacagccctgacggggaacttctctgcgggagtgtccgggaataattaaaacgatgcacacagggtttagcgcgtacacgtattgcattatgccaacgccccggtgctgacacggaagaaaccggacgttatgatttagcgtggaaagatttgtgtagtgttctgaatgctctcagtaaatagtaatgaattatcaaaggtatagtaatatcttttatgttcatggatatttgtaacccatcggaaaactcctgctttagcaagattttccctgtattgctgaaatgtgatttctcttgatttcaacctatcataggacgtttctataagatgcgtgtttcttgagaatttaacatttacaacctttttaagtccttttattaacacggtgttatcgttttctaacacgatgtgaatattatctgtggctagatagtaaatataatgtgagacgttgtgacgtttgctagcctgtcagaccaagtttactcatatatactttagattgatttaaaacttcatttttaatttaaaaggatctaggtgaagatcctttttgataatctcatgaccaaaatcccttaacgtgagttttcgttccactgagcgtcagaccccgtagaaaagatcaaaggatcttcttgagatcctttttttctgcgcgtaatctgctgcttgcaaacaaaaaaaccaccgctaccagcggtggtttgtttgccggatcaagagctaccaactctttttccgaaggtaactggcttcagcagagcgcagataccaaatactgttcttctagtgtagccgtagttaggccaccacttcaagaactctgtagcaccgcctacatacctcgctctgctaatcctgttaccagtggctgctgccagtggcgataagtcgtgtcttaccgggttggactcaagacgatagttaccggataaggcgcagcggtcgggctgaacggggggttcgtgcacacagcccagcttggagcgaacgacctacaccgaactgagatacctacagcgtgagctatgagaaagcgccacgcttcccgaagggagaaaggcggacaggtatccggtaagcggcagggtcggaacaggagagcgcacgagggagcttccagggggaaacgcctggtatctttatagtcctgtcgggtttcgccacctctgacttgagcgtcgatttttgtgatgctcgtcaggggggcggagcctatggaaaaacgccagcaacgcggcctttttacggttcctggccttttgctggccttttgctcacatgttctttcctgcgttatcccctgattctgtggataaccgtattaccgcctttgagtgagctgataccgctcgccgcagccgaacgaccgagcgcagcgagtcagtgagcgaggaagcggaagagcgcccaatacgcaaaccgcctctccccgcgcgttggccgattcattaatgcagctggcacgacaggtttcccgactggaaagcgggcagtgagcgcaacgcaattaatgtgagttagctcactcattaggcaccccaggctttacactttatgcttccggctcgtatgttgtgtggaattgtgagcggataacaatttcacacaggaaacagctatgaccatgattacgccaagtttgcacgcctgccgttcgacgatttcgcgagttggttcagctgctgcctgaggctggacgacctcgcggagttctaccggcagtgcaaatccgtcggcatccaggaaaccagcagcggctatccgcgcatccatgcccccgaactgcaggagtggggaggcacgatggccgctttggtccggatctttgtgaaggaaccttacttctgtggtgtgacataattggacaaactacctacagagatttaaagctctaaggtaaatataaaatttttaagtgtataatgtgttaaactactgattctaattgtttgtgtattttagattccaacctatggaactgatgaatgggagcagtggtggaatgcctttaatgaggaaaacctgttttgctcagaagaaatgccatctagtgatgatgaggctactgctgactctcaacattctactcctccaaaaaagaagagaaaggtagaagaccccaaggactttccttcagaattgctaagttttttgagtcatgctgtgtttagtaatagaactcttgcttgctttgctatttacaccacaaaggaaaaagctgcactgctatacaagaaaattatggaaaaatattctgtaacctttataagtaggcataacagttataatcataacatactgttttttcttactccacacaggcatagagtgt

SEQ ID NO: 72 - DNA, 10635 bp, synthetic construct
  source 1..10635: mol_type = other DNA
ctgctattaataactatgctcaaaaattgtgtacctttagctttttaatttgtaaaggggttaataaggaatatttgatgtatagtgccttgactagagatcataatcagccataccacatttgtagaggttttacttgctttaaaaaacctcccacacctccccctgaacctgaaacataaaatgaatgcaattgttgttgttctagcttggccactccctctctgcgcgctcgctcgctcactgaggccgggcgaccaaaggtcgcccgacgcccgggctttgcccgggcggcctcagtgagcgagcgagcgcgcagagagggagtggccaactccatcactaggggttcctctcgaggagcttggcccattgcatacgttgtatccatatcataatatgtacatttatattggctcatgtccaacattaccgccatgttactagtacgcgtgagggcctatttcccatgattccttcatatttgcatatacgatacaaggctgttagagagataattggaattaatttgactgtaaacacaaagatattagtacaaaatacgtgacgtagaaagtaataatttcttgggtagtttgcagttttaaaattatgttttaaaatggactatcatatgcttaccgtaacttgaaagtatttcgatttcttggctttatatatcttgtggaaaggacgaaacaccgccgtttaagggatggttggttggtggggtattaatgtttaattaccggtcgacaggctcagaggcacacaggagtttctgggctcaccctgcccccttccaacccctcagttcccatcctccagcagctgtttgtgtgctgcctctgaagtccacactgaacaaacttcagcctactcatgtccctaaaatgggcaaacattgcaagcagcaaacagcaaacacacagccctccctgcctgctgaccttggagctggggcagaggtcagagacctctctgggcccatgccacctccaacatccactcgaccccttggaatttcggtggagaggagcagaggttgtcctggcgtggtttaggtagtgtgagaggggtcgacgatcttgctaccagtggaacagccactaaggattctgcagtgagagcagagggccagctaagtggtactctcccagagactgtctgactcacgccaccccctccaccttggacacaggacgctgtggtttctgagccaggtacaatgactcctttcggtaagtgcagtggaagctgtacactgcccaggcaaagcgtccgggcagcgtaggcgggcgactcagatcccagccagtggacttagcccctgtttgctcctccgataactggggtgaccttggttaatattcaccagcagcctcccccgttgcccctctggatccactgcttaaatacggacgaggacagggccctgtctcctcagcttcaggcaccaccactgacctgggacagtgaatcgtaagtatgcctttcactgcgagaggttctggagaggcttctgagctccccatggcccaggcaggcagcaggtctggggcaggaggggggttgtggagtgggtatccgcctgctgaggtgcagggcagatcatcatgtgccttgactcggggcctggcccccccatctctgtcttgcaggacaattgccgtcttctgtctcgtggggcatcctcctgctggcaggcctgtgctgcctggtccctgtctccctggctgaggaccgggtaccgccaccatgagcacagcagtgttggagaaccctggcctgggcaggaaactgtctgactttggccaggaaaccagctacattgaggataactgtaaccagaatggagccatcagcctgatcttcagcctgaaagaggaggtgggggccctggccaaggtgctgagactgtttgaggaaaatgatgtcaacctgacccacattgagtccagacccagcagactcaagaaagatgaatatgagttcttcacacacctggacaagagaagcctgcctgccctgaccaacatcatcaagatcctgagacatgacataggagccacagtgcatgaactgagcagagacaagaagaaggacacagtgccctggttccctagaaccatccaggaactggacagatttgccaaccagatcctgagttatggagctgagctggatgctgaccacccaggcttcaaggaccctgtgtacagagccagaaggaagcagtttgctgacattgcctacaactacagacacggccagcctatccccagagtggaatacatggaagaggagaagaagacctggggcactgtgttcaagacccttaagtctctgtacaaaacccacgcctgctatgaatacaaccacatcttccctctgctggagaagtactgtggcttccacgaagacaatatcccccagctggaggatgtgagccagttcctgcaaacctgcactggcttcagactgagacctgtggcaggcctgctgagcagcagagacttcctgggtggcctggccttcagagtcttccactgtacccagtacatcaggcatggcagcaagcccatgtacacaccagagcctgacatctgccacgagctgctgggccatgtgcctctgttctcagacagaagctttgcccagttctcccaggagattggcttagcctccttaggagcccctgatgaatacatagagaaactggccaccatctactggttcacagtggagtttggcctgtgcaagcaaggtgacagcatcaaggcctatggagctggcctgctgagcagctttggagaacttcagtactgcctctctgagaagcccaaactgctgcctctggaactggagaagacagccatccagaactacacagtgacagaattccaacctctgtactatgttgctgagagcttcaatgatgccaaagagaaggtgagaaactttgctgccaccatccccagacccttctctgtgaggtatgacccttacacccagagaattgaagtgctggataacacccagcagctgaagatcctagctgacagcatcaactctgagataggcatcctgtgctctgccctgcaaaagatcaagtgaagatctaatcaacctctggattacaaaatttgtgaaagattgactggtattcttaactatgttgctccttttacgctatgtggatacgctgctttaatgcctttgtatcatgctattgcttcccgtatggctttcattttctcctccttgtataaatcctggttgctgtctctttatgaggagttgtggcccgttgtcaggcaacgtggcgtggtgtgcactgtgtttgctgacgcaacccccactggttggggcattgccaccacctgtcagctcctttccgggactttcgctttccccctccctattgccacggcggaactcatcgccgcctgccttgcccgctgctggacaggggctcggctgttgggcactgacaattccgtggtgttgtcggggaagctgacgtcctttccatggctgctcgcctgtgttgccacctggattctgcgcgggacgtccttctgctacgtcccttcggccctcaatccagcggaccttccttcccgcggcctgctgccggctctgcggcctcttccgcgtcttcgccttcgccctcagacgagtcggatctccctttgggccgcctccccgcgcctcgagagctcctgtgccttctagttgccagccatctgttgtttgcccctcccccgtgccttccttgaccctggaaggtgccactcccactgtcctttcctaataaaatgaggaaattgcatcgcattgtctgagtaggtgtcattctattctggggggtggggtggggcaggacagcaagggggaggattgggaagacaatagcaggcatgctggggatgcggtgggctctatggatcccctaactacaaggaacccctagtgatggagttggccactccctctctgcgcgctcgctcgctcactgaggccgggcgaccaaaggtcgcccgacgcccgggctttgcccgggcggcctcagtgagcgagcgagcgcgcagagagggagtggccaacaggaagctcctctgtgtcctcataaaccctaacctcctctacttgagaggacattccaatcataggctgcccatccaccctctgtgtcctcctgttaattaggtcacttaacaaaaaggaaattgggtaggggtttttcacagaccgctttctaagggtaattttaaaatatctgggaagtcccttccactgctgtgttccagaagtgttggtaaacagcccacaaatgtcaacagcagaaacatacaagctgtcagctttgcacaagggcccaatctctggaagatccgcgcgtaccgagttctaattcactggccgtcgttttacaacgtcgtgactgggaaaaccctggcgttacccaacttaatcgccttgcagcacatccccctttcgccagctggcgtaatagcgaagaggcccgcaccgatcgcccttcccaacagttgcgcagcctgaatggcgaatggcgcctgatgcggtattttctccttacgcatctgtgcggtatttcacaccgcatatggtgcactctcagtacaatctgctctgatgccgcatagttaagccagccccgacacccgccaacacccgctgacgcgccctgacgggcttgtctgctcccggcatccgcttacagacaagctgtgaccgtctccgggagctgcatgtgtcagaggttttcaccgtcatcaccgaaacgcgcgagacgaaagggcctcgtgatacgcctatttttataggttaatgtcatgataataatggtttcttagacgtcaggtggcacttttcggggaaatgtgcgcggaacccccatttgtttatttttctaaatacattcaaatatgtatccgctcatgagacaataaccctgataaatgcttcaataatattgaaaaaggaagagtatgagccatattcaacgggaaacgtcttgctctaggccgcgattaaattccaacatggatgctgatttatatgggtataaatgggctcgcgataatgtcgggcaatcaggtgcgacaatctatcgattgtatgggaagcccgatgcgccagagttgtttctgaaacatggcaaaggtagcgttgccaatgatgttacagatgagatggtcagactaaactggctgacggaatttatgcctcttccgaccatcaagcattttatccgtactcctgatgatgcatggttactcaccactgcgatccctgggaaaacagcattccaggtattagaagaatatcctgattcaggtgaaaatattgttgatgcgctggcagtgttcctgcgccggttgcattcgattcctgtttgtaattgtccttttaacagcgatcgcgtatttcgtctcgctcaggcgcaatcacgaatgaataacggtttggttgatgcgagtgattttgatgacgagcgtaatggctggcctgttgaacaagtctggaaagaaatgcataaacttttgccattctcaccggattcagtcgtcactcatggtgatttctcacttgataaccttatttttgacgaggggaaattaataggttgtattgatgttggacgagtcggaatcgcagaccgataccaggatcttgccatcctatggaactgcctcggtgagttttctccttcattacagaaacggctttttcaaaaatatggtattgataatcctgatatgaataaattgcagtttcatttgatgctcgatgagtttttctaaaagcttgtgcaatgccacaaagaagagtcaatcgcagacaacattttgaatgcggtcacacgttagcagcatgattgccacggatggcaacatattaacggcatgatattgacttattgaataaaattgggtaaatttgactcaacgatgggttaattcgctcgttgtggtagtgagatgaaaagaggcggcgcttactaccgattccgcctagttggtcacttcgacgtatcgtctggaactccaaccatcgcaggcagagaggtctgcaaaatgcaatcccgaaacagttcgcaggtaatagttagagcctgcataacggtttcgggattttttatatctgcacaacaggtaagagcattgagtcgataatcgtgaagagtcggcgagcctggttagccagtgctctttccgttgtgctgaattaagcgaataccggaagcagaaccggatcaccaaatgcgtacaggcgtcatcgccgcccagcaacagcacaacccaaactgagccgtagccactgtctgtcctgaattcattagtaatagttacgctgcggccttttacacatgaccttcgtgaaagcgggtggcaggaggtcgcgctaacaacctcctgccgttttgcccgtgcatatcggtcacgaacaaatctgattactaaacacagtagcctggatttgttctatcagtaatcgaccttattcctaattaaatagagcaaatccccttattgggggtaagacatgaagatgccagaaaaacatgacctgttggccgccattctcgcggcaaaggaacaaggcatcggggcaatccttgcgtttgcaatggcgtaccttcgcggcagatataatggcggtgcgtttacaaaaacagtaatcgacgcaacgatgtgcgccattatcgcctggttcattcgtgaccttctcgacttcgccggactaagtagcaatctcgcttatataacgagcgtgtttatcggctacatcggtactgactcgattggttcgcttatcaaacgcttcgctgctaaaaaagccggagtagaagatggtagaaatcaataatcaacgtaaggcgttcctcgatatgctggcgtggtcggagggaactgataacggacgtcagaaaaccagaaatcatggttatgacgtcattgtaggcggagagctatttactgattactccgatcaccctcgcaaacttgtcacgctaaacccaaaactcaaatcaacaggcgccggacgctaccagcttctttcccgttggtgggatgcctaccgcaagcagcttggcctgaaagacttctctccgaaaagtcaggacgctgtggcattgcagcagattaaggagcgtggcgctttacctatgattgatcgtggtgatatccgtcaggcaatcgaccgttgcagcaatatctgggcttcactgccgggcgctggttatggtcagttcgagcataaggctgacagcctgattgcaaaattcaaagaagcgggcggaacggtcagagagattgatgtatgagcagagtcaccgcgattatctccgctctggttatctgcatcatcgtctgcctgtcatgggctgttaatcattaccgtgataacgccattacctacaaagcccagcgcgacaaaaatgccagagaactgaagctggcgaacgcggcaattactgacatgcagatgcgtcagcgtgatgttgctgcgctcgatgcaaaatacacgaaggagttagctgatgctaaagctgaaaatgatgctctgcgtgatgatgttgccgctggtcgtcgtcggttgcacatcaaagcagtctgtcagtcagtgcgtgaagccaccaccgcctccggcgtggataatgcagcctccccccgactggcagacaccgctgaacgggattatttcaccctcagagagaggctgatcactatgcaaaaacaactggaaggaacccagaagtatattaatgagcagtgcagatagagttgcccatatcgatgggcaactcatgcaattattgtgagcaatacacacgcgcttccagcggagtataaatgcctaaagtaataaaaccgagcaatccatttacgaatgtttgctgggtttctgttttaacaacattttctgcgccgccacaaattttggctgcatcgacagttttcttctgcccaattccagaaacgaagaaatgatgggtgatggtttcctttggtgctactgctgccggtttgttttgaacagtaaacgtctgttgagcacatcctgtaataagcagggccagcgcagtagcgagtagcatttttttcatggtgttattcccgatgctttttgaagttcgcagaatcgtatgtgtagaaaattaaacaaaccctaaacaatgagttgaaatttcatattgttaatatttattaatgtatgtcaggtgcgatgaatcgtcattgtattcccggattaactatgtccacagccctgacggggaacttctctgcgggagtgtccgggaataattaaaacgatgcacacagggtttagcgcgtacacgtattgcattatgccaacgccccggtgctgacacggaagaaaccggacgttatgatttagcgtggaaagatttgtgtagtgttctgaatgctctcagtaaatagtaatgaattatcaaaggtatagtaatatcttttatgttcatggatatttgtaacccatcggaaaactcctgctttagcaagattttccctgtattgctgaaatgtgatttctcttgatttcaacctatcataggacgtttctataagatgcgtgtttcttgagaatttaacatttacaacctttttaagtccttttattaacacggtgttatcgttttctaacacgatgtgaatattatctgtggctagatagtaaatataatgtgagacgttgtgacgtttgctagcctgtcagaccaagtttactcatatatactttagattgatttaaaacttcatttttaatttaaaaggatctaggtgaagatcctttttgataatctcatgaccaaaatcccttaacgtgagttttcgttccactgagcgtcagaccccgtagaaaagatcaaaggatcttcttgagatcctttttttctgcgcgtaatctgctgcttgcaaacaaaaaaaccaccgctaccagcggtggtttgtttgccggatcaagagctaccaactctttttccgaaggtaactggcttcagcagagcgcagataccaaatactgttcttctagtgtagccgtagttaggccaccacttcaagaactctgtagcaccgcctacatacctcgctctgctaatcctgttaccagtggctgctgccagtggcgataagtcgtgtcttaccgggttggactcaagacgatagttaccggataaggcgcagcggtcgggctgaacggggggttcgtgcacacagcccagcttggagcgaacgacctacaccgaactgagatacctacagcgtgagctatgagaaagcgccacgcttcccgaagggagaaaggcggacaggtatccggtaagcggcagggtcggaacaggagagcgcacgagggagcttccagggggaaacgcctggtatctttatagtcctgtcgggtttcgccacctctgacttgagcgtcgatttttgtgatgctcgtcaggggggcggagcctatggaaaaacgccagcaacgcggcctttttacggttcctggccttttgctggccttttgctcacatgttctttcctgcgttatcccctgattctgtggataaccgtattaccgcctttgagtgagctgataccgctcgccgcagccgaacgaccgagcgcagcgagtcagtgagcgaggaagcggaagagcgcccaatacgcaaaccgcctctccccgcgcgttggccgattcattaatgcagctggcacgacaggtttcccgactggaaagcgggcagtgagcgcaacgcaattaatgtgagttagctcactcattaggcaccccaggctttacactttatgcttccggctcgtatgttgtgtggaattgtgagcggataacaatttcacacaggaaacagctatgaccatgattacgccaagtttgcacgcctgccgttcgacgatttcgcgagttggttcagctgctgcctgaggctggacgacctcgcggagttctaccggcagtgcaaatccgtcggcatccaggaaaccagcagcggctatccgcgcatccatgcccccgaactgcaggagtggggaggcacgatggccgctttggtccggatctttgtgaaggaaccttacttctgtggtgtgacataattggacaaactacctacagagatttaaagctctaaggtaaatataaaatttttaagtgtataatgtgttaaactactgattctaattgtttgtgtattttagattccaacctatggaactgatgaatgggagcagtggtggaatgcctttaatgaggaaaacctgttttgctcagaagaaatgccatctagtgatgatgaggctactgctgactctcaacattctactcctccaaaaaagaagagaaaggtagaagaccccaaggactttccttcagaattgctaagttttttgagtcatgctgtgtttagtaatagaactcttgcttgctttgctatttacaccacaaaggaaaaagctgcactgctatacaagaaaattatggaaaaatattctgtaacctttataagtaggcataacagttataatcataacatactgttttttcttactccacacaggcatagagtgt

SEQ ID NO: 73 - DNA, 11361 bp, synthetic construct
  source 1..11361: mol_type = other DNA
ctgctattaataactatgctcaaaaattgtgtacctttagctttttaatttgtaaaggggttaataaggaatatttgatgtatagtgccttgactagagatcataatcagccataccacatttgtagaggttttacttgctttaaaaaacctcccacacctccccctgaacctgaaacataaaatgaatgcaattgttgttgttctagcttggccactccctctctgcgcgctcgctcgctcactgaggccgggcgaccaaaggtcgcccgacgcccgggctttgcccgggcggcctcagtgagcgagcgagcgcgcagagagggagtggccaactccatcactaggggttcctctcgaggcggccgcaggctcagaggcacacaggagtttctgggctcaccctgcccccttccaacccctcagttcccatcctccagcagctgtttgtgtgctgcctctgaagtccacactgaacaaacttcagcctactcatgtccctaaaatgggcaaacattgcaagcagcaaacagcaaacacacagccctccctgcctgctgaccttggagctggggcagaggtcagagacctctctgggcccatgccacctccaacatccactcgaccccttggaatttcggtggagaggagcagaggttgtcctggcgtggtttaggtagtgtgagaggggtcgacgatcttgctaccagtggaacagccactaaggattctgcagtgagagcagagggccagctaagtggtactctcccagagactgtctgactcacgccaccccctccaccttggacacaggacgctgtggtttctgagccaggtacaatgactcctttcggtaagtgcagtggaagctgtacactgcccaggcaaagcgtccgggcagcgtaggcgggcgactcagatcccagccagtggacttagcccctgtttgctcctccgataactggggtgaccttggttaatattcaccagcagcctcccccgttgcccctctggatccactgcttaaatacggacgaggacagggccctgtctcctcagcttcaggcaccaccactgacctgggacagtgaatcgtaagtatgcctttcactgcgagaggttctggagaggcttctgagctccccatggcccaggcaggcagcaggtctggggcaggaggggggttgtggagtgggtatccgcctgctgaggtgcagggcagatcatcatgtgccttgactcggggcctggcccccccatctctgtcttgcaggacaattgccgtcttctgtctcgtggggcatcctcctgctggcaggcctgtgctgcctggtccctgtctccctggctgaggaccgggtaccgccaccatgagcacagcagtgttggagaaccctggcctgggcaggaaactgtctgactttggccaggaaaccagctacattgaggataactgtaaccagaatggagccatcagcctgatcttcagcctgaaagaggaggtgggggccctggccaaggtgctgagactgtttgaggaaaatgatgtcaacctgacccacattgagtccagacccagcagactcaagaaagatgaatatgagttcttcacacacctggacaagagaagcctgcctgccctgaccaacatcatcaagatcctgagacatgacataggagccacagtgcatgaactgagcagagacaagaagaaggacacagtgccctggttccctagaaccatccaggaactggacagatttgccaaccagatcctgagttatggagctgagctggatgctgaccacccaggcttcaaggaccctgtgtacagagccagaaggaagcagtttgctgacattgcctacaactacagacacggccagcctatccccagagtggaatacatggaagaggagaagaagacctggggcactgtgttcaagacccttaagtctctgtacaaaacccacgcctgctatgaatacaaccacatcttccctctgctggagaagtactgtggcttccacgaagacaatatcccccagctggaggatgtgagccagttcctgcaaacctgcactggcttcagactgagacctgtggcaggcctgctgagcagcagagacttcctgggtggcctggccttcagagtcttccactgtacccagtacatcaggcatggcagcaagcccatgtacacaccagagcctgacatctgccacgagctgctgggccatgtgcctctgttctcagacagaagctttgcccagttctcccaggagattggcttagcctccttaggagcccctgatgaatacatagagaaactggccaccatctactggttcacagtggagtttggcctgtgcaagcaaggtgacagcatcaaggcctatggagctggcctgctgagcagctttggagaacttcagtactgcctctctgagaagcccaaactgctgcctctggaactggagaagacagccatccagaactacacagtgacagaattccaacctctgtactatgttgctgagagcttcaatgatgccaaagagaaggtgagaaactttgctgccaccatccccagacccttctctgtgaggtatgacccttacacccagagaattgaagtgctggataacacccagcagctgaagatcctagctgacagcatcaactctgagataggcatcctgtgctctgccctgcaaaagatcaagtgaagatctgcctcgactgtgccttctagttgccagccatctgttgtttgcccctcccccgtgccttccttgaccctggaaggtgccactcccactgtcctttcctaataaaatgaggaaattgcatcgcattgtctgagtaggtgtcattctattctggggggtggggtggggcaggacagcaagggggaggattgggaagacaatagcaggcatgctggggatgcggtgggctctatggggcgcgccgttcggctttacgtcacgcgagggcggcagggaggacggaatggcggggtttggggtgggtccctcctcgggggagccctgggaaaagaggactgcgtgtgggaagagaaggtggaaatggcgttttggttgacatgtgccgcctgcgagcgtgctgcggggaggggccgagggcagattcgggaatgatggcgcggggtgggggcgtgggggctttctcgggagaggcccttccctggaagtttggggtgcgatggtgaggttctcggggcacctctggaggggcctcggcacggaaagcgaccacctgggagggcgtgtggggaccaggttttgcctttagttttgcacacactgtagttcatctttatggagatgctcatggcctcattgaagccccactacagctctggtagcggtaaccatgcgtatttgacacacgaaggaactagggaaaaggcattaggtcatttcaagccgaaattcacatgtgctagaatccagattccatgctgaccgatgccccaggatatagaaaatgagaatctggtccttaccttcaagaacattcttaaccgtaatcagcctctggtatcttagctccaccctcactggttttttcttgtttgttgaaccggccaagctgctggcctccctcctcaaccgttctgatcatgcttgctaaaatagtcaaaaccccggccagttaaatatgctttagcctgctttattatgattatttttgttgttttggcaatgacctggttacctgttgtttctcccactaaaactttttaagggcaggaatcaccgccgtaactctagcacttagcacagtacttggcttgtaagaggtcctcgatgatggtttgttgaatgaatacattaaataattaaccacttgaaccctaagaaagaagcgattctatttcatattaggcattgtaatgacttaaggtaaagagcagtgctattaacggagtctaactgggaatccagcttgtttgggctatttactagttgtgtggctgtgggcaacttacttcacctctctgggcttaagtcattttatgtatatctgaggtgctggctacctcttggagttattgagaggattataagacagtctatgtgaatcagcaacccttgcatggcccctggcggggaacagtaataatagccatcatcatgtttacttacatagtcctaattagtcttcaaaacagccctgtagcaatggtatgattattaccattttacagatgaggaacctttgaagcctcagagaggctaacagacataccctaggtcatacagttattaagagaaggagctctgtctcgaacctagctctctctctctcgagtaataccagttaaaaaataggctacaaataggtactcaaaaaaatggtagtggctgttgtttttattcagttgctgaggaaaaaatgttgatttttcatctctaaacatcaacttacttaattctgccaatttcttttttttgagacagggtctcactctgtcacctaggatggagtgcagtggcacaatcactgctcactgcagcctcgacttcccgggctcgggtgattctccccaggctcaggggattctcccacttcagcctcccaagtagctgggactacaggtgcgcaccaccatccctggctaatatttgtactttattttatttataccggtcctaactacaaggaacccctagtgatggagttggccactccctctctgcgcgctcgctcgctcactgaggccgggcgaccaaaggtcgcccgacgcccgggctttgcccgggcggcctcagtgagcgagcgagcgcgcagagagggagtggccaacaggaagctcctctgtgtcctcataaaccctaacctcctctacttgagaggacattccaatcataggctgcccatccaccctctgtgtcctcctgttaattaggtcacttaacaaaaaggaaattgggtaggggtttttcacagaccgctttctaagggtaattttaaaatatctgggaagtcccttccactgctgtgttccagaagtgttggtaaacagcccacaaatgtcaacagcagaaacatacaagctgtcagctttgcacaagggcccaatctctggaagatccgcgcgtaccgagttctaattcactggccgtcgttttacaacgtcgtgactgggaaaaccctggcgttacccaacttaatcgccttgcagcacatccccctttcgccagctggcgtaatagcgaagaggcccgcaccgatcgcccttcccaacagttgcgcagcctgaatggcgaatggcgcctgatgcggtattttctccttacgcatctgtgcggtatttcacaccgcatatggtgcactctcagtacaatctgctctgatgccgcatagttaagccagccccgacacccgccaacacccgctgacgcgccctgacgggcttgtctgctcccggcatccgcttacagacaagctgtgaccgtctccgggagctgcatgtgtcagaggttttcaccgtcatcaccgaaacgcgcgagacgaaagggcctcgtgatacgcctatttttataggttaatgtcatgataataatggtttcttagacgtcaggtggcacttttcggggaaatgtgcgcggaacccccatttgtttatttttctaaatacattcaaatatgtatccgctcatgagacaataaccctgataaatgcttcaataatattgaaaaaggaagagtatgagccatattcaacgggaaacgtcttgctctaggccgcgattaaattccaacatggatgctgatttatatgggtataaatgggctcgcgataatgtcgggcaatcaggtgcgacaatctatcgattgtatgggaagcccgatgcgccagagttgtttctgaaacatggcaaaggtagcgttgccaatgatgttacagatgagatggtcagactaaactggctgacggaatttatgcctcttccgaccatcaagcattttatccgtactcctgatgatgcatggttactcaccactgcgatccctgggaaaacagcattccaggtattagaagaatatcctgattcaggtgaaaatattgttgatgcgctggcagtgttcctgcgccggttgcattcgattcctgtttgtaattgtccttttaacagcgatcgcgtatttcgtctcgctcaggcgcaatcacgaatgaataacggtttggttgatgcgagtgattttgatgacgagcgtaatggctggcctgttgaacaagtctggaaagaaatgcataaacttttgccattctcaccggattcagtcgtcactcatggtgatttctcacttgataaccttatttttgacgaggggaaattaataggttgtattgatgttggacgagtcggaatcgcagaccgataccaggatcttgccatcctatggaactgcctcggtgagttttctccttcattacagaaacggctttttcaaaaatatggtattgataatcctgatatgaataaattgcagtttcatttgatgctcgatgagtttttctaaaagcttgtgcaatgccacaaagaagagtcaatcgcagacaacattttgaatgcggtcacacgttagcagcatgattgccacggatggcaacatattaacggcatgatattgacttattgaataaaattgggtaaatttgactcaacgatgggttaattcgctcgttgtggtagtgagatgaaaagaggcggcgcttactaccgattccgcctagttggtcacttcgacgtatcgtctggaactccaaccatcgcaggcagagaggtctgcaaaatgcaatcccgaaacagttcgcaggtaatagttagagcctgcataacggtttcgggattttttatatctgcacaacaggtaagagcattgagtcgataatcgtgaagagtcggcgagcctggttagccagtgctctttccgttgtgctgaattaagcgaataccggaagcagaaccggatcaccaaatgcgtacaggcgtcatcgccgcccagcaacagcacaacccaaactgagccgtagccactgtctgtcctgaattcattagtaatagttacgctgcggccttttacacatgaccttcgtgaaagcgggtggcaggaggtcgcgctaacaacctcctgccgttttgcccgtgcatatcggtcacgaacaaatctgattactaaacacagtagcctggatttgttctatcagtaatcgaccttattcctaattaaatagagcaaatccccttattgggggtaagacatgaagatgccagaaaaacatgacctgttggccgccattctcgcggcaaaggaacaaggcatcggggcaatccttgcgtttgcaatggcgtaccttcgcggcagatataatggcggtgcgtttacaaaaacagtaatcgacgcaacgatgtgcgccattatcgcctggttcattcgtgaccttctcgacttcgccggactaagtagcaatctcgcttatataacgagcgtgtttatcggctacatcggtactgactcgattggttcgcttatcaaacgcttcgctgctaaaaaagccggagtagaagatggtagaaatcaataatcaacgtaaggcgttcctcgatatgctggcgtggtcggagggaactgataacggacgtcagaaaaccagaaatcatggttatgacgtcattgtaggcggagagctatttactgattactccgatcaccctcgcaaacttgtcacgctaaacccaaaactcaaatcaacaggcgccggacgctaccagcttctttcccgttggtgggatgcctaccgcaagcagcttggcctgaaagacttctctccgaaaagtcaggacgctgtggcattgcagcagattaaggagcgtggcgctttacctatgattgatcgtggtgatatccgtcaggcaatcgaccgttgcagcaatatctgggcttcactgccgggcgctggttatggtcagttcgagcataaggctgacagcctgattgcaaaattcaaagaagcgggcggaacggtcagagagattgatgtatgagcagagtcaccgcgattatctccgctctggttatctgcatcatcgtctgcctgtcatgggctgttaatcattaccgtgataacgccattacctacaaagcccagcgcgacaaaaatgccagagaactgaagctggcgaacgcggcaattactgacatgcagatgcgtcagcgtgatgttgctgcgctcgatgcaaaatacacgaaggagttagctgatgctaaagctgaaaatgatgctctgcgtgatgatgttgccgctggtcgtcgtcggttgcacatcaaagcagtctgtcagtcagtgcgtgaagccaccaccgcctccggcgtggataatgcagcctccccccgactggcagacaccgctgaacgggattatttcaccctcagagagaggctgatcactatgcaaaaacaactggaaggaacccagaagtatattaatgagcagtgcagatagagttgcccatatcgatgggcaactcatgcaattattgtgagcaatacacacgcgcttccagcggagtataaatgcctaaagtaataaaaccgagcaatccatttacgaatgtttgctgggtttctgttttaacaacattttctgcgccgccacaaattttggctgcatcgacagttttcttctgcccaattccagaaacgaagaaatgatgggtgatggtttcctttggtgctactgctgccggtttgttttgaacagtaaacgtctgttgagcacatcctgtaataagcagggccagcgcagtagcgagtagcatttttttcatggtgttattcccgatgctttttgaagttcgcagaatcgtatgtgtagaaaattaaacaaaccctaaacaatgagttgaaatttcatattgttaatatttattaatgtatgtcaggtgcgatgaatcgtcattgtattcccggattaactatgtccacagccctgacggggaacttctctgcgggagtgtccgggaataattaaaacgatgcacacagggtttagcgcgtacacgtattgcattatgccaacgccccggtgctgacacggaagaaaccggacgttatgatttagcgtggaaagatttgtgtagtgttctgaatgctctcagtaaatagtaatgaattatcaaaggtatagtaatatcttttatgttcatggatatttgtaacccatcggaaaactcctgctttagcaagattttccctgtattgctgaaatgtgatttctcttgatttcaacctatcataggacgtttctataagatgcgtgtttcttgagaatttaacatttacaacctttttaagtccttttattaacacggtgttatcgttttctaacacgatgtgaatattatctgtggctagatagtaaatataatgtgagacgttgtgacgtttgctagcctgtcagaccaagtttactcatatatactttagattgatttaaaacttcatttttaatttaaaaggatctaggtgaagatcctttttgataatctcatgaccaaaatcccttaacgtgagttttcgttccactgagcgtcagaccccgtagaaaagatcaaaggatcttcttgagatcctttttttctgcgcgtaatctgctgcttgcaaacaaaaaaaccaccgctaccagcggtggtttgtttgccggatcaagagctaccaactctttttccgaaggtaactggcttcagcagagcgcagataccaaatactgttcttctagtgtagccgtagttaggccaccacttcaagaactctgtagcaccgcctacatacctcgctctgctaatcctgttaccagtggctgctgccagtggcgataagtcgtgtcttaccgggttggactcaagacgatagttaccggataaggcgcagcggtcgggctgaacggggggttcgtgcacacagcccagcttggagcgaacgacctacaccgaactgagatacctacagcgtgagctatgagaaagcgccacgcttcccgaagggagaaaggcggacaggtatccggtaagcggcagggtcggaacaggagagcgcacgagggagcttccagggggaaacgcctggtatctttatagtcctgtcgggtttcgccacctctgacttgagcgtcgatttttgtgatgctcgtcaggggggcggagcctatggaaaaacgccagcaacgcggcctttttacggttcctggccttttgctggccttttgctcacatgttctttcctgcgttatcccctgattctgtggataaccgtattaccgcctttgagtgagctgataccgctcgccgcagccgaacgaccgagcgcagcgagtcagtgagcgaggaagcggaagagcgcccaatacgcaaaccgcctctccccgcgcgttggccgattcattaatgcagctggcacgacaggtttcccgactggaaagcgggcagtgagcgcaacgcaattaatgtgagttagctcactcattaggcaccccaggctttacactttatgcttccggctcgtatgttgtgtggaattgtgagcggataacaatttcacacaggaaacagctatgaccatgattacgccaagtttgcacgcctgccgttcgacgatttcgcgagttggttcagctgctgcctgaggctggacgacctcgcggagttctaccggcagtgcaaatccgtcggcatccaggaaaccagcagcggctatccgcgcatccatgcccccgaactgcaggagtggggaggcacgatggccgctttggtccggatctttgtgaaggaaccttacttctgtggtgtgacataattggacaaactacctacagagatttaaagctctaaggtaaatataaaatttttaagtgtataatgtgttaaactactgattctaattgtttgtgtattttagattccaacctatggaactgatgaatgggagcagtggtggaatgcctttaatgaggaaaacctgttttgctcagaagaaatgccatctagtgatgatgaggctactgctgactctcaacattctactcctccaaaaaagaagagaaaggtagaagaccccaaggactttccttcagaattgctaagttttttgagtcatgctgtgtttagtaatagaactcttgcttgctttgctatttacaccacaaaggaaaaagctgcactgctatacaagaaaattatggaaaaatattctgtaacctttataagtaggcataacagttataatcataacatactgttttttcttactccacacaggcatagagtgt

SEQ ID NO: 74 - DNA, 10334 bp, synthetic construct
  source 1..10334: mol_type = other DNA
ctgctattaataactatgctcaaaaattgtgtacctttagctttttaatttgtaaaggggttaataaggaatatttgatgtatagtgccttgactagagatcataatcagccataccacatttgtagaggttttacttgctttaaaaaacctcccacacctccccctgaacctgaaacataaaatgaatgcaattgttgttgttctagcttggccactccctctctgcgcgctcgctcgctcactgaggccgggcgaccaaaggtcgcccgacgcccgggctttgcccgggcggcctcagtgagcgagcgagcgcgcagagagggagtggccaactccatcactaggggttcctctcgaggagcttggcccattgcatacgttgtatccatatcataatatgtacatttatattggctcatgtccaacattaccgccatgttactagtacgcgtaggctcagaggcacacaggagtttctgggctcaccctgcccccttccaacccctcagttcccatcctccagcagctgtttgtgtgctgcctctgaagtccacactgaacaaacttcagcctactcatgtccctaaaatgggcaaacattgcaagcagcaaacagcaaacacacagccctccctgcctgctgaccttggagctggggcagaggtcagagacctctctgggcccatgccacctccaacatccactcgaccccttggaatttcggtggagaggagcagaggttgtcctggcgtggtttaggtagtgtgagaggggtcgacgatcttgctaccagtggaacagccactaaggattctgcagtgagagcagagggccagctaagtggtactctcccagagactgtctgactcacgccaccccctccaccttggacacaggacgctgtggtttctgagccaggtacaatgactcctttcggtaagtgcagtggaagctgtacactgcccaggcaaagcgtccgggcagcgtaggcgggcgactcagatcccagccagtggacttagcccctgtttgctcctccgataactggggtgaccttggttaatattcaccagcagcctcccccgttgcccctctggatccactgcttaaatacggacgaggacagggccctgtctcctcagcttcaggcaccaccactgacctgggacagtgaatcgtaagtatgcctttcactgcgagaggttctggagaggcttctgagctccccatggcccaggcaggcagcaggtctggggcaggaggggggttgtggagtgggtatccgcctgctgaggtgcagggcagatcatcatgtgccttgactcggggcctggcccccccatctctgtcttgcaggacaattgccgtcttctgtctcgtggggcatcctcctgctggcaggcctgtgctgcctggtccctgtctccctggctgaggaccgggtaccgccaccatgagcacagcagtgttggagaaccctggcctgggcaggaaactgtctgactttggccaggaaaccagctacattgaggataactgtaaccagaatggagccatcagcctgatcttcagcctgaaagaggaggtgggggccctggccaaggtgctgagactgtttgaggaaaatgatgtcaacctgacccacattgagtccagacccagcagactcaagaaagatgaatatgagttcttcacacacctggacaagagaagcctgcctgccctgaccaacatcatcaagatcctgagacatgacataggagccacagtgcatgaactgagcagagacaagaagaaggacacagtgccctggttccctagaaccatccaggaactggacagatttgccaaccagatcctgagttatggagctgagctggatgctgaccacccaggcttcaaggaccctgtgtacagagccagaaggaagcagtttgctgacattgcctacaactacagacacggccagcctatccccagagtggaatacatggaagaggagaagaagacctggggcactgtgttcaagacccttaagtctctgtacaaaacccacgcctgctatgaatacaaccacatcttccctctgctggagaagtactgtggcttccacgaagacaatatcccccagctggaggatgtgagccagttcctgcaaacctgcactggcttcagactgagacctgtggcaggcctgctgagcagcagagacttcctgggtggcctggccttcagagtcttccactgtacccagtacatcaggcatggcagcaagcccatgtacacaccagagcctgacatctgccacgagctgctgggccatgtgcctctgttctcagacagaagctttgcccagttctcccaggagattggcttagcctccttaggagcccctgatgaatacatagagaaactggccaccatctactggttcacagtggagtttggcctgtgcaagcaaggtgacagcatcaaggcctatggagctggcctgctgagcagctttggagaacttcagtactgcctctctgagaagcccaaactgctgcctctggaactggagaagacagccatccagaactacacagtgacagaattccaacctctgtactatgttgctgagagcttcaatgatgccaaagagaaggtgagaaactttgctgccaccatccccagacccttctctgtgaggtatgacccttacacccagagaattgaagtgctggataacacccagcagctgaagatcctagctgacagcatcaactctgagataggcatcctgtgctctgccctgcaaaagatcaagtgaagatctaatcaacctctggattacaaaatttgtgaaagattgactggtattcttaactatgttgctccttttacgctatgtggatacgctgctttaatgcctttgtatcatgctattgcttcccgtatggctttcattttctcctccttgtataaatcctggttgctgtctctttatgaggagttgtggcccgttgtcaggcaacgtggcgtggtgtgcactgtgtttgctgacgcaacccccactggttggggcattgccaccacctgtcagctcctttccgggactttcgctttccccctccctattgccacggcggaactcatcgccgcctgccttgcccgctgctggacaggggctcggctgttgggcactgacaattccgtggtgttgtcggggaagctgacgtcctttccatggctgctcgcctgtgttgccacctggattctgcgcgggacgtccttctgctacgtcccttcggccctcaatccagcggaccttccttcccgcggcctgctgccggctctgcggcctcttccgcgtcttcgccttcgccctcagacgagtcggatctccctttgggccgcctccccgcgcctcgaggcgcgccctgtgccttctagttgccagccatctgttgtttgcccctcccccgtgccttccttgaccctggaaggtgccactcccactgtcctttcctaataaaatgaggaaattgcatcgcattgtctgagtaggtgtcattctattctggggggtggggtggggcaggacagcaagggggaggattgggaagacaatagcaggcatgctggggatgcggtgggctctatggatcccctaactacaaggaacccctagtgatggagttggccactccctctctgcgcgctcgctcgctcactgaggccgggcgaccaaaggtcgcccgacgcccgggctttgcccgggcggcctcagtgagcgagcgagcgcgcagagagggagtggccaacaggaagctcctctgtgtcctcataaaccctaacctcctctacttgagaggacattccaatcataggctgcccatccaccctctgtgtcctcctgttaattaggtcacttaacaaaaaggaaattgggtaggggtttttcacagaccgctttctaagggtaattttaaaatatctgggaagtcccttccactgctgtgttccagaagtgttggtaaacagcccacaaatgtcaacagcagaaacatacaagctgtcagctttgcacaagggcccaatctctggaagatccgcgcgtaccgagttctaattcactggccgtcgttttacaacgtcgtgactgggaaaaccctggcgttacccaacttaatcgccttgcagcacatccccctttcgccagctggcgtaatagcgaagaggcccgcaccgatcgcccttcccaacagttgcgcagcctgaatggcgaatggcgcctgatgcggtattttctccttacgcatctgtgcggtatttcacaccgcatatggtgcactctcagtacaatctgctctgatgccgcatagttaagccagccccgacacccgccaacacccgctgacgcgccctgacgggcttgtctgctcccggcatccgcttacagacaagctgtgaccgtctccgggagctgcatgtgtcagaggttttcaccgtcatcaccgaaacgcgcgagacgaaagggcctcgtgatacgcctatttttataggttaatgtcatgataataatggtttcttagacgtcaggtggcacttttcggggaaatgtgcgcggaacccccatttgtttatttttctaaatacattcaaatatgtatccgctcatgagacaataaccctgataaatgcttcaataatattgaaaaaggaagagtatgagccatattcaacgggaaacgtcttgctctaggccgcgattaaattccaacatggatgctgatttatatgggtataaatgggctcgcgataatgtcgggcaatcaggtgcgacaatctatcgattgtatgggaagcccgatgcgccagagttgtttctgaaacatggcaaaggtagcgttgccaatgatgttacagatgagatggtcagactaaactggctgacggaatttatgcctcttccgaccatcaagcattttatccgtactcctgatgatgcatggttactcaccactgcgatccctgggaaaacagcattccaggtattagaagaatatcctgattcaggtgaaaatattgttgatgcgctggcagtgttcctgcgccggttgcattcgattcctgtttgtaattgtccttttaacagcgatcgcgtatttcgtctcgctcaggcgcaatcacgaatgaataacggtttggttgatgcgagtgattttgatgacgagcgtaatggctggcctgttgaacaagtctggaaagaaatgcataaacttttgccattctcaccggattcagtcgtcactcatggtgatttctcacttgataaccttatttttgacgaggggaaattaataggttgtattgatgttggacgagtcggaatcgcagaccgataccaggatcttgccatcctatggaactgcctcggtgagttttctccttcattacagaaacggctttttcaaaaatatggtattgataatcctgatatgaataaattgcagtttcatttgatgctcgatgagtttttctaaaagcttgtgcaatgccacaaagaagagtcaatcgcagacaacattttgaatgcggtcacacgttagcagcatgattgccacggatggcaacatattaacggcatgatattgacttattgaataaaattgggtaaatttgactcaacgatgggttaattcgctcgttgtggtagtgagatgaaaagaggcggcgcttactaccgattccgcctagttggtcacttcgacgtatcgtctggaactccaaccatcgcaggcagagaggtctgcaaaatgcaatcccgaaacagttcgcaggtaatagttagagcctgcataacggtttcgggattttttatatctgcacaacaggtaagagcattgagtcgataatcgtgaagagtcggcgagcctggttagccagtgctctttccgttgtgctgaattaagcgaataccggaagcagaaccggatcaccaaatgcgtacaggcgtcatcgccgcccagcaacagcacaacccaaactgagccgtagccactgtctgtcctgaattcattagtaatagttacgctgcggccttttacacatgaccttcgtgaaagcgggtggcaggaggtcgcgctaacaacctcctgccgttttgcccgtgcatatcggtcacgaacaaatctgattactaaacacagtagcctggatttgttctatcagtaatcgaccttattcctaattaaatagagcaaatccccttattgggggtaagacatgaagatgccagaaaaacatgacctgttggccgccattctcgcggcaaaggaacaaggcatcggggcaatccttgcgtttgcaatggcgtaccttcgcggcagatataatggcggtgcgtttacaaaaacagtaatcgacgcaacgatgtgcgccattatcgcctggttcattcgtgaccttctcgacttcgccggactaagtagcaatctcgcttatataacgagcgtgtttatcggctacatcggtactgactcgattggttcgcttatcaaacgcttcgctgctaaaaaagccggagtagaagatggtagaaatcaataatcaacgtaaggcgttcctcgatatgctggcgtggtcggagggaactgataacggacgtcagaaaaccagaaatcatggttatgacgtcattgtaggcggagagctatttactgattactccgatcaccctcgcaaacttgtcacgctaaacccaaaactcaaatcaacaggcgccggacgctaccagcttctttcccgttggtgggatgcctaccgcaagcagcttggcctgaaagacttctctccgaaaagtcaggacgctgtggcattgcagcagattaaggagcgtggcgctttacctatgattgatcgtggtgatatccgtcaggcaatcgaccgttgcagcaatatctgggcttcactgccgggcgctggttatggtcagttcgagcataaggctgacagcctgattgcaaaattcaaagaagcgggcggaacggtcagagagattgatgtatgagcagagtcaccgcgattatctccgctctggttatctgcatcatcgtctgcctgtcatgggctgttaatcattaccgtgataacgccattacctacaaagcccagcgcgacaaaaatgccagagaactgaagctggcgaacgcggcaattactgacatgcagatgcgtcagcgtgatgttgctgcgctcgatgcaaaatacacgaaggagttagctgatgctaaagctgaaaatgatgctctgcgtgatgatgttgccgctggtcgtcgtcggttgcacatcaaagcagtctgtcagtcagtgcgtgaagccaccaccgcctccggcgtggataatgcagcctccccccgactggcagacaccgctgaacgggattatttcaccctcagagagaggctgatcactatgcaaaaacaactggaaggaacccagaagtatattaatgagcagtgcagatagagttgcccatatcgatgggcaactcatgcaattattgtgagcaatacacacgcgcttccagcggagtataaatgcctaaagtaataaaaccgagcaatccatttacgaatgtttgctgggtttctgttttaacaacattttctgcgccgccacaaattttggctgcatcgacagttttcttctgcccaattccagaaacgaagaaatgatgggtgatggtttcctttggtgctactgctgccggtttgttttgaacagtaaacgtctgttgagcacatcctgtaataagcagggccagcgcagtagcgagtagcatttttttcatggtgttattcccgatgctttttgaagttcgcagaatcgtatgtgtagaaaattaaacaaaccctaaacaatgagttgaaatttcatattgttaatatttattaatgtatgtcaggtgcgatgaatcgtcattgtattcccggattaactatgtccacagccctgacggggaacttctctgcgggagtgtccgggaataattaaaacgatgcacacagggtttagcgcgtacacgtattgcattatgccaacgccccggtgctgacacggaagaaaccggacgttatgatttagcgtggaaagatttgtgtagtgttctgaatgctctcagtaaatagtaatgaattatcaaaggtatagtaatatcttttatgttcatggatatttgtaacccatcggaaaactcctgctttagcaagattttccctgtattgctgaaatgtgatttctcttgatttcaacctatcataggacgtttctataagatgcgtgtttcttgagaatttaacatttacaacctttttaagtccttttattaacacggtgttatcgttttctaacacgatgtgaatattatctgtggctagatagtaaatataatgtgagacgttgtgacgtttgctagcctgtcagaccaagtttactcatatatactttagattgatttaaaacttcatttttaatttaaaaggatctaggtgaagatcctttttgataatctcatgaccaaaatcccttaacgtgagttttcgttccactgagcgtcagaccccgtagaaaagatcaaaggatcttcttgagatcctttttttctgcgcgtaatctgctgcttgcaaacaaaaaaaccaccgctaccagcggtggtttgtttgccggatcaagagctaccaactctttttccgaaggtaactggcttcagcagagcgcagataccaaatactgttcttctagtgtagccgtagttaggccaccacttcaagaactctgtagcaccgcctacatacctcgctctgctaatcctgttaccagtggctgctgccagtggcgataagtcgtgtcttaccgggttggactcaagacgatagttaccggataaggcgcagcggtcgggctgaacggggggttcgtgcacacagcccagcttggagcgaacgacctacaccgaactgagatacctacagcgtgagctatgagaaagcgccacgcttcccgaagggagaaaggcggacaggtatccggtaagcggcagggtcggaacaggagagcgcacgagggagcttccagggggaaacgcctggtatctttatagtcctgtcgggtttcgccacctctgacttgagcgtcgatttttgtgatgctcgtcaggggggcggagcctatggaaaaacgccagcaacgcggcctttttacggttcctggccttttgctggccttttgctcacatgttctttcctgcgttatcccctgattctgtggataaccgtattaccgcctttgagtgagctgataccgctcgccgcagccgaacgaccgagcgcagcgagtcagtgagcgaggaagcggaagagcgcccaatacgcaaaccgcctctccccgcgcgttggccgattcattaatgcagctggcacgacaggtttcccgactggaaagcgggcagtgagcgcaacgcaattaatgtgagttagctcactcattaggcaccccaggctttacactttatgcttccggctcgtatgttgtgtggaattgtgagcggataacaatttcacacaggaaacagctatgaccatgattacgccaagtttgcacgcctgccgttcgacgatttcgcgagttggttcagctgctgcctgaggctggacgacctcgcggagttctaccggcagtgcaaatccgtcggcatccaggaaaccagcagcggctatccgcgcatccatgcccccgaactgcaggagtggggaggcacgatggccgctttggtccggatctttgtgaaggaaccttacttctgtggtgtgacataattggacaaactacctacagagatttaaagctctaaggtaaatataaaatttttaagtgtataatgtgttaaactactgattctaattgtttgtgtattttagattccaacctatggaactgatgaatgggagcagtggtggaatgcctttaatgaggaaaacctgttttgctcagaagaaatgccatctagtgatgatgaggctactgctgactctcaacattctactcctccaaaaaagaagagaaaggtagaagaccccaaggactttccttcagaattgctaagttttttgagtcatgctgtgtttagtaatagaactcttgcttgctttgctatttacaccacaaaggaaaaagctgcactgctatacaagaaaattatggaaaaatattctgtaacctttataagtaggcataacagttataatcataacatactgttttttcttactccacacaggcatagagtgt

SEQ ID NO: 75 - DNA, 11664 bp, synthetic construct
  source 1..11664: mol_type = other DNA
ctgctattaataactatgctcaaaaattgtgtacctttagctttttaatttgtaaaggggttaataaggaatatttgatgtatagtgccttgactagagatcataatcagccataccacatttgtagaggttttacttgctttaaaaaacctcccacacctccccctgaacctgaaacataaaatgaatgcaattgttgttgttctagcttggccactccctctctgcgcgctcgctcgctcactgaggccgggcgaccaaaggtcgcccgacgcccgggctttgcccgggcggcctcagtgagcgagcgagcgcgcagagagggagtggccaactccatcactaggggttcctctcgaggcggccgcgagggcctatttcccatgattccttcatatttgcatatacgatacaaggctgttagagagataattggaattaatttgactgtaaacacaaagatattagtacaaaatacgtgacgtagaaagtaataatttcttgggtagtttgcagttttaaaattatgttttaaaatggactatcatatgcttaccgtaacttgaaagtatttcgatttcttggctttatatatcttgtggaaaggacgaaacaccgccgtttaagggatggttggttggtggggtattaatgtttaattaccggtcgacaggctcagaggcacacaggagtttctgggctcaccctgcccccttccaacccctcagttcccatcctccagcagctgtttgtgtgctgcctctgaagtccacactgaacaaacttcagcctactcatgtccctaaaatgggcaaacattgcaagcagcaaacagcaaacacacagccctccctgcctgctgaccttggagctggggcagaggtcagagacctctctgggcccatgccacctccaacatccactcgaccccttggaatttcggtggagaggagcagaggttgtcctggcgtggtttaggtagtgtgagaggggtcgacgatcttgctaccagtggaacagccactaaggattctgcagtgagagcagagggccagctaagtggtactctcccagagactgtctgactcacgccaccccctccaccttggacacaggacgctgtggtttctgagccaggtacaatgactcctttcggtaagtgcagtggaagctgtacactgcccaggcaaagcgtccgggcagcgtaggcgggcgactcagatcccagccagtggacttagcccctgtttgctcctccgataactggggtgaccttggttaatattcaccagcagcctcccccgttgcccctctggatccactgcttaaatacggacgaggacagggccctgtctcctcagcttcaggcaccaccactgacctgggacagtgaatcgtaagtatgcctttcactgcgagaggttctggagaggcttctgagctccccatggcccaggcaggcagcaggtctggggcaggaggggggttgtggagtgggtatccgcctgctgaggtgcagggcagatcatcatgtgccttgactcggggcctggcccccccatctctgtcttgcaggacaattgccgtcttctgtctcgtggggcatcctcctgctggcaggcctgtgctgcctggtccctgtctccctggctgaggaccgggtaccgccaccatgagcacagcagtgttggagaaccctggcctgggcaggaaactgtctgactttggccaggaaaccagctacattgaggataactgtaaccagaatggagccatcagcctgatcttcagcctgaaagaggaggtgggggccctggccaaggtgctgagactgtttgaggaaaatgatgtcaacctgacccacattgagtccagacccagcagactcaagaaagatgaatatgagttcttcacacacctggacaagagaagcctgcctgccctgaccaacatcatcaagatcctgagacatgacataggagccacagtgcatgaactgagcagagacaagaagaaggacacagtgccctggttccctagaaccatccaggaactggacagatttgccaaccagatcctgagttatggagctgagctggatgctgaccacccaggcttcaaggaccctgtgtacagagccagaaggaagcagtttgctgacattgcctacaactacagacacggccagcctatccccagagtggaatacatggaagaggagaagaagacctggggcactgtgttcaagacccttaagtctctgtacaaaacccacgcctgctatgaatacaaccacatcttccctctgctggagaagtactgtggcttccacgaagacaatatcccccagctggaggatgtgagccagttcctgcaaacctgcactggcttcagactgagacctgtggcaggcctgctgagcagcagagacttcctgggtggcctggccttcagagtcttccactgtacccagtacatcaggcatggcagcaagcccatgtacacaccagagcctgacatctgccacgagctgctgggccatgtgcctctgttctcagacagaagctttgcccagttctcccaggagattggcttagcctccttaggagcccctgatgaatacatagagaaactggccaccatctactggttcacagtggagtttggcctgtgcaagcaaggtgacagcatcaaggcctatggagctggcctgctgagcagctttggagaacttcagtactgcctctctgagaagcccaaactgctgcctctggaactggagaagacagccatccagaactacacagtgacagaattccaacctctgtactatgttgctgagagcttcaatgatgccaaagagaaggtgagaaactttgctgccaccatccccagacccttctctgtgaggtatgacccttacacccagagaattgaagtgctggataacacccagcagctgaagatcctagctgacagcatcaactctgagataggcatcctgtgctctgccctgcaaaagatcaagtgaagatctgcctcgactgtgccttctagttgccagccatctgttgtttgcccctcccccgtgccttccttgaccctggaaggtgccactcccactgtcctttcctaataaaatgaggaaattgcatcgcattgtctgagtaggtgtcattctattctggggggtggggtggggcaggacagcaagggggaggattgggaagacaatagcaggcatgctggggatgcggtgggctctatggggcgcgccgttcggctttacgtcacgcgagggcggcagggaggacggaatggcggggtttggggtgggtccctcctcgggggagccctgggaaaagaggactgcgtgtgggaagagaaggtggaaatggcgttttggttgacatgtgccgcctgcgagcgtgctgcggggaggggccgagggcagattcgggaatgatggcgcggggtgggggcgtgggggctttctcgggagaggcccttccctggaagtttggggtgcgatggtgaggttctcggggcacctctggaggggcctcggcacggaaagcgaccacctgggagggcgtgtggggaccaggttttgcctttagttttgcacacactgtagttcatctttatggagatgctcatggcctcattgaagccccactacagctctggtagcggtaaccatgcgtatttgacacacgaaggaactagggaaaaggcattaggtcatttcaagccgaaattcacatgtgctagaatccagattccatgctgaccgatgccccaggatatagaaaatgagaatctggtccttaccttcaagaacattcttaaccgtaatcagcctctggtatcttagctccaccctcactggttttttcttgtttgttgaaccggccaagctgctggcctccctcctcaaccgttctgatcatgcttgctaaaatagtcaaaaccccggccagttaaatatgctttagcctgctttattatgattatttttgttgttttggcaatgacctggttacctgttgtttctcccactaaaactttttaagggcaggaatcaccgccgtaactctagcacttagcacagtacttggcttgtaagaggtcctcgatgatggtttgttgaatgaatacattaaataattaaccacttgaaccctaagaaagaagcgattctatttcatattaggcattgtaatgacttaaggtaaagagcagtgctattaacggagtctaactgggaatccagcttgtttgggctatttactagttgtgtggctgtgggcaacttacttcacctctctgggcttaagtcattttatgtatatctgaggtgctggctacctcttggagttattgagaggattataagacagtctatgtgaatcagcaacccttgcatggcccctggcggggaacagtaataatagccatcatcatgtttacttacatagtcctaattagtcttcaaaacagccctgtagcaatggtatgattattaccattttacagatgaggaacctttgaagcctcagagaggctaacagacataccctaggtcatacagttattaagagaaggagctctgtctcgaacctagctctctctctctcgagtaataccagttaaaaaataggctacaaataggtactcaaaaaaatggtagtggctgttgtttttattcagttgctgaggaaaaaatgttgatttttcatctctaaacatcaacttacttaattctgccaatttcttttttttgagacagggtctcactctgtcacctaggatggagtgcagtggcacaatcactgctcactgcagcctcgacttcccgggctcgggtgattctccccaggctcaggggattctcccacttcagcctcccaagtagctgggactacaggtgcgcaccaccatccctggctaatatttgtactttattttatttataccggtcctaactacaaggaacccctagtgatggagttggccactccctctctgcgcgctcgctcgctcactgaggccgggcgaccaaaggtcgcccgacgcccgggctttgcccgggcggcctcagtgagcgagcgagcgcgcagagagggagtggccaacaggaagctcctctgtgtcctcataaaccctaacctcctctacttgagaggacattccaatcataggctgcccatccaccctctgtgtcctcctgttaattaggtcacttaacaaaaaggaaattgggtaggggtttttcacagaccgctttctaagggtaattttaaaatatctgggaagtcccttccactgctgtgttccagaagtgttggtaaacagcccacaaatgtcaacagcagaaacatacaagctgtcagctttgcacaagggcccaatctctggaagatccgcgcgtaccgagttctaattcactggccgtcgttttacaacgtcgtgactgggaaaaccctggcgttacccaacttaatcgccttgcagcacatccccctttcgccagctggcgtaatagcgaagaggcccgcaccgatcgcccttcccaacagttgcgcagcctgaatggcgaatggcgcctgatgcggtattttctccttacgcatctgtgcggtatttcacaccgcatatggtgcactctcagtacaatctgctctgatgccgcatagttaagccagccccgacacccgccaacacccgctgacgcgccctgacgggcttgtctgctcccggcatccgcttacagacaagctgtgaccgtctccgggagctgcatgtgtcagaggttttcaccgtcatcaccgaaacgcgcgagacgaaagggcctcgtgatacgcctatttttataggttaatgtcatgataataatggtttcttagacgtcaggtggcacttttcggggaaatgtgcgcggaacccccatttgtttatttttctaaatacattcaaatatgtatccgctcatgagacaataaccctgataaatgcttcaataatattgaaaaaggaagagtatgagccatattcaacgggaaacgtcttgctctaggccgcgattaaattccaacatggatgctgatttatatgggtataaatgggctcgcgataatgtcgggcaatcaggtgcgacaatctatcgattgtatgggaagcccgatgcgccagagttgtttctgaaacatggcaaaggtagcgttgccaatgatgttacagatgagatggtcagactaaactggctgacggaatttatgcctcttccgaccatcaagcattttatccgtactcctgatgatgcatggttactcaccactgcgatccctgggaaaacagcattccaggtattagaagaatatcctgattcaggtgaaaatattgttgatgcgctggcagtgttcctgcgccggttgcattcgattcctgtttgtaattgtccttttaacagcgatcgcgtatttcgtctcgctcaggcgcaatcacgaatgaataacggtttggttgatgcgagtgattttgatgacgagcgtaatggctggcctgttgaacaagtctggaaagaaatgcataaacttttgccattctcaccggattcagtcgtcactcatggtgatttctcacttgataaccttatttttgacgaggggaaattaataggttgtattgatgttggacgagtcggaatcgcagaccgataccaggatcttgccatcctatggaactgcctcggtgagttttctccttcattacagaaacggctttttcaaaaatatggtattgataatcctgatatgaataaattgcagtttcatttgatgctcgatgagtttttctaaaagcttgtgcaatgccacaaagaagagtcaatcgcagacaacattttgaatgcggtcacacgttagcagcatgattgccacggatggcaacatattaacggcatgatattgacttattgaataaaattgggtaaatttgactcaacgatgggttaattcgctcgttgtggtagtgagatgaaaagaggcggcgcttactaccgattccgcctagttggtcacttcgacgtatcgtctggaactccaaccatcgcaggcagagaggtctgcaaaatgcaatcccgaaacagttcgcaggtaatagttagagcctgcataacggtttcgggattttttatatctgcacaacaggtaagagcattgagtcgataatcgtgaagagtcggcgagcctggttagccagtgctctttccgttgtgctgaattaagcgaataccggaagcagaaccggatcaccaaatgcgtacaggcgtcatcgccgcccagcaacagcacaacccaaactgagccgtagccactgtctgtcctgaattcattagtaatagttacgctgcggccttttacacatgaccttcgtgaaagcgggtggcaggaggtcgcgctaacaacctcctgccgttttgcccgtgcatatcggtcacgaacaaatctgattactaaacacagtagcctggatttgttctatcagtaatcgaccttattcctaattaaatagagcaaatccccttattgggggtaagacatgaagatgccagaaaaacatgacctgttggccgccattctcgcggcaaaggaacaaggcatcggggcaatccttgcgtttgcaatggcgtaccttcgcggcagatataatggcggtgcgtttacaaaaacagtaatcgacgcaacgatgtgcgccattatcgcctggttcattcgtgaccttctcgacttcgccggactaagtagcaatctcgcttatataacgagcgtgtttatcggctacatcggtactgactcgattggttcgcttatcaaacgcttcgctgctaaaaaagccggagtagaagatggtagaaatcaataatcaacgtaaggcgttcctcgatatgctggcgtggtcggagggaactgataacggacgtcagaaaaccagaaatcatggttatgacgtcattgtaggcggagagctatttactgattactccgatcaccctcgcaaacttgtcacgctaaacccaaaactcaaatcaacaggcgccggacgctaccagcttctttcccgttggtgggatgcctaccgcaagcagcttggcctgaaagacttctctccgaaaagtcaggacgctgtggcattgcagcagattaaggagcgtggcgctttacctatgattgatcgtggtgatatccgtcaggcaatcgaccgttgcagcaatatctgggcttcactgccgggcgctggttatggtcagttcgagcataaggctgacagcctgattgcaaaattcaaagaagcgggcggaacggtcagagagattgatgtatgagcagagtcaccgcgattatctccgctctggttatctgcatcatcgtctgcctgtcatgggctgttaatcattaccgtgataacgccattacctacaaagcccagcgcgacaaaaatgccagagaactgaagctggcgaacgcggcaattactgacatgcagatgcgtcagcgtgatgttgctgcgctcgatgcaaaatacacgaaggagttagctgatgctaaagctgaaaatgatgctctgcgtgatgatgttgccgctggtcgtcgtcggttgcacatcaaagcagtctgtcagtcagtgcgtgaagccaccaccgcctccggcgtggataatgcagcctccccccgactggcagacaccgctgaacgggattatttcaccctcagagagaggctgatcactatgcaaaaacaactggaaggaacccagaagtatattaatgagcagtgcagatagagttgcccatatcgatgggcaactcatgcaattattgtgagcaatacacacgcgcttccagcggagtataaatgcctaaagtaataaaaccgagcaatccatttacgaatgtttgctgggtttctgttttaacaacattttctgcgccgccacaaattttggctgcatcgacagttttcttctgcccaattccagaaacgaagaaatgatgggtgatggtttcctttggtgctactgctgccggtttgttttgaacagtaaacgtctgttgagcacatcctgtaataagcagggccagcgcagtagcgagtagcatttttttcatggtgttattcccgatgctttttgaagttcgcagaatcgtatgtgtagaaaattaaacaaaccctaaacaatgagttgaaatttcatattgttaatatttattaatgtatgtcaggtgcgatgaatcgtcattgtattcccggattaactatgtccacagccctgacggggaacttctctgcgggagtgtccgggaataattaaaacgatgcacacagggtttagcgcgtacacgtattgcattatgccaacgccccggtgctgacacggaagaaaccggacgttatgatttagcgtggaaagatttgtgtagtgttctgaatgctctcagtaaatagtaatgaattatcaaaggtatagtaatatcttttatgttcatggatatttgtaacccatcggaaaactcctgctttagcaagattttccctgtattgctgaaatgtgatttctcttgatttcaacctatcataggacgtttctataagatgcgtgtttcttgagaatttaacatttacaacctttttaagtccttttattaacacggtgttatcgttttctaacacgatgtgaatattatctgtggctagatagtaaatataatgtgagacgttgtgacgtttgctagcctgtcagaccaagtttactcatatatactttagattgatttaaaacttcatttttaatttaaaaggatctaggtgaagatcctttttgataatctcatgaccaaaatcccttaacgtgagttttcgttccactgagcgtcagaccccgtagaaaagatcaaaggatcttcttgagatcctttttttctgcgcgtaatctgctgcttgcaaacaaaaaaaccaccgctaccagcggtggtttgtttgccggatcaagagctaccaactctttttccgaaggtaactggcttcagcagagcgcagataccaaatactgttcttctagtgtagccgtagttaggccaccacttcaagaactctgtagcaccgcctacatacctcgctctgctaatcctgttaccagtggctgctgccagtggcgataagtcgtgtcttaccgggttggactcaagacgatagttaccggataaggcgcagcggtcgggctgaacggggggttcgtgcacacagcccagcttggagcgaacgacctacaccgaactgagatacctacagcgtgagctatgagaaagcgccacgcttcccgaagggagaaaggcggacaggtatccggtaagcggcagggtcggaacaggagagcgcacgagggagcttccagggggaaacgcctggtatctttatagtcctgtcgggtttcgccacctctgacttgagcgtcgatttttgtgatgctcgtcaggggggcggagcctatggaaaaacgccagcaacgcggcctttttacggttcctggccttttgctggccttttgctcacatgttctttcctgcgttatcccctgattctgtggataaccgtattaccgcctttgagtgagctgataccgctcgccgcagccgaacgaccgagcgcagcgagtcagtgagcgaggaagcggaagagcgcccaatacgcaaaccgcctctccccgcgcgttggccgattcattaatgcagctggcacgacaggtttcccgactggaaagcgggcagtgagcgcaacgcaattaatgtgagttagctcactcattaggcaccccaggctttacactttatgcttccggctcgtatgttgtgtggaattgtgagcggataacaatttcacacaggaaacagctatgaccatgattacgccaagtttgcacgcctgccgttcgacgatttcgcgagttggttcagctgctgcctgaggctggacgacctcgcggagttctaccggcagtgcaaatccgtcggcatccaggaaaccagcagcggctatccgcgcatccatgcccccgaactgcaggagtggggaggcacgatggccgctttggtccggatctttgtgaaggaaccttacttctgtggtgtgacataattggacaaactacctacagagatttaaagctctaaggtaaatataaaatttttaagtgtataatgtgttaaactactgattctaattgtttgtgtattttagattccaacctatggaactgatgaatgggagcagtggtggaatgcctttaatgaggaaaacctgttttgctcagaagaaatgccatctagtgatgatgaggctactgctgactctcaacattctactcctccaaaaaagaagagaaaggtagaagaccccaaggactttccttcagaattgctaagttttttgagtcatgctgtgtttagtaatagaactcttgcttgctttgctatttacaccacaaaggaaaaagctgcactgctatacaagaaaattatggaaaaatattctgtaacctttataagtaggcataacagttataatcataacatactgttttttcttactccacacaggcatagagtgt

SEQ ID NO: 76 - DNA, 9737 bp, synthetic construct
  source 1..9737: mol_type = other DNA
ctgctattaataactatgctcaaaaattgtgtacctttagctttttaatttgtaaaggggttaataaggaatatttgatgtatagtgccttgactagagatcataatcagccataccacatttgtagaggttttacttgctttaaaaaacctcccacacctccccctgaacctgaaacataaaatgaatgcaattgttgttgttctagcttggccactccctctctgcgcgctcgctcgctcactgaggccgggcgaccaaaggtcgcccgacgcccgggctttgcccgggcggcctcagtgagcgagcgagcgcgcagagagggagtggccaactccatcactaggggttcctctcgaggagcttggcccattgcatacgttgtatccatatcataatatgtacatttatattggctcatgtccaacattaccgccatgttactagtgtcgacaggctcagaggcacacaggagtttctgggctcaccctgcccccttccaacccctcagttcccatcctccagcagctgtttgtgtgctgcctctgaagtccacactgaacaaacttcagcctactcatgtccctaaaatgggcaaacattgcaagcagcaaacagcaaacacacagccctccctgcctgctgaccttggagctggggcagaggtcagagacctctctgggcccatgccacctccaacatccactcgaccccttggaatttcggtggagaggagcagaggttgtcctggcgtggtttaggtagtgtgagaggggtcgacgatcttgctaccagtggaacagccactaaggattctgcagtgagagcagagggccagctaagtggtactctcccagagactgtctgactcacgccaccccctccaccttggacacaggacgctgtggtttctgagccaggtacaatgactcctttcggtaagtgcagtggaagctgtacactgcccaggcaaagcgtccgggcagcgtaggcgggcgactcagatcccagccagtggacttagcccctgtttgctcctccgataactggggtgaccttggttaatattcaccagcagcctcccccgttgcccctctggatccactgcttaaatacggacgaggacagggccctgtctcctcagcttcaggcaccaccactgacctgggacagtgaatcgtaagtatgcctttcactgcgagaggttctggagaggcttctgagctccccatggcccaggcaggcagcaggtctggggcaggaggggggttgtggagtgggtatccgcctgctgaggtgcagggcagatcatcatgtgccttgactcggggcctggcccccccatctctgtcttgcaggacaattgccgtcttctgtctcgtggggcatcctcctgctggcaggcctgtgctgcctggtccctgtctccctggctgaggaccgggtaccgccaccatgagcacagcagtgttggagaaccctggcctgggcaggaaactgtctgactttggccaggaaaccagctacattgaggataactgtaaccagaatggagccatcagcctgatcttcagcctgaaagaggaggtgggggccctggccaaggtgctgagactgtttgaggaaaatgatgtcaacctgacccacattgagtccagacccagcagactcaagaaagatgaatatgagttcttcacacacctggacaagagaagcctgcctgccctgaccaacatcatcaagatcctgagacatgacataggagccacagtgcatgaactgagcagagacaagaagaaggacacagtgccctggttccctagaaccatccaggaactggacagatttgccaaccagatcctgagttatggagctgagctggatgctgaccacccaggcttcaaggaccctgtgtacagagccagaaggaagcagtttgctgacattgcctacaactacagacacggccagcctatccccagagtggaatacatggaagaggagaagaagacctggggcactgtgttcaagacccttaagtctctgtacaaaacccacgcctgctatgaatacaaccacatcttccctctgctggagaagtactgtggcttccacgaagacaatatcccccagctggaggatgtgagccagttcctgcaaacctgcactggcttcagactgagacctgtggcaggcctgctgagcagcagagacttcctgggtggcctggccttcagagtcttccactgtacccagtacatcaggcatggcagcaagcccatgtacacaccagagcctgacatctgccacgagctgctgggccatgtgcctctgttctcagacagaagctttgcccagttctcccaggagattggcttagcctccttaggagcccctgatgaatacatagagaaactggccaccatctactggttcacagtggagtttggcctgtgcaagcaaggtgacagcatcaaggcctatggagctggcctgctgagcagctttggagaacttcagtactgcctctctgagaagcccaaactgctgcctctggaactggagaagacagccatccagaactacacagtgacagaattccaacctctgtactatgttgctgagagcttcaatgatgccaaagagaaggtgagaaactttgctgccaccatccccagacccttctctgtgaggtatgacccttacacccagagaattgaagtgctggataacacccagcagctgaagatcctagctgacagcatcaactctgagataggcatcctgtgctctgccctgcaaaagatcaagtgaagatctgcctcgactgtgccttctagttgccagccatctgttgtttgcccctcccccgtgccttccttgaccctggaaggtgccactcccactgtcctttcctaataaaatgaggaaattgcatcgcattgtctgagtaggtgtcattctattctggggggtggggtggggcaggacagcaagggggaggattgggaagacaatagcaggcatgctggggatgcggtgggctctatggatcccctaactacaaggaacccctagtgatggagttggccactccctctctgcgcgctcgctcgctcactgaggccgggcgaccaaaggtcgcccgacgcccgggctttgcccgggcggcctcagtgagcgagcgagcgcgcagagagggagtggccaacaggaagctcctctgtgtcctcataaaccctaacctcctctacttgagaggacattccaatcataggctgcccatccaccctctgtgtcctcctgttaattaggtcacttaacaaaaaggaaattgggtaggggtttttcacagaccgctttctaagggtaattttaaaatatctgggaagtcccttccactgctgtgttccagaagtgttggtaaacagcccacaaatgtcaacagcagaaacatacaagctgtcagctttgcacaagggcccaatctctggaagatccgcgcgtaccgagttctaattcactggccgtcgttttacaacgtcgtgactgggaaaaccctggcgttacccaacttaatcgccttgcagcacatccccctttcgccagctggcgtaatagcgaagaggcccgcaccgatcgcccttcccaacagttgcgcagcctgaatggcgaatggcgcctgatgcggtattttctccttacgcatctgtgcggtatttcacaccgcatatggtgcactctcagtacaatctgctctgatgccgcatagttaagccagccccgacacccgccaacacccgctgacgcgccctgacgggcttgtctgctcccggcatccgcttacagacaagctgtgaccgtctccgggagctgcatgtgtcagaggttttcaccgtcatcaccgaaacgcgcgagacgaaagggcctcgtgatacgcctatttttataggttaatgtcatgataataatggtttcttagacgtcaggtggcacttttcggggaaatgtgcgcggaacccccatttgtttatttttctaaatacattcaaatatgtatccgctcatgagacaataaccctgataaatgcttcaataatattgaaaaaggaagagtatgagccatattcaacgggaaacgtcttgctctaggccgcgattaaattccaacatggatgctgatttatatgggtataaatgggctcgcgataatgtcgggcaatcaggtgcgacaatctatcgattgtatgggaagcccgatgcgccagagttgtttctgaaacatggcaaaggtagcgttgccaatgatgttacagatgagatggtcagactaaactggctgacggaatttatgcctcttccgaccatcaagcattttatccgtactcctgatgatgcatggttactcaccactgcgatccctgggaaaacagcattccaggtattagaagaatatcctgattcaggtgaaaatattgttgatgcgctggcagtgttcctgcgccggttgcattcgattcctgtttgtaattgtccttttaacagcgatcgcgtatttcgtctcgctcaggcgcaatcacgaatgaataacggtttggttgatgcgagtgattttgatgacgagcgtaatggctggcctgttgaacaagtctggaaagaaatgcataaacttttgccattctcaccggattcagtcgtcactcatggtgatttctcacttgataaccttatttttgacgaggggaaattaataggttgtattgatgttggacgagtcggaatcgcagaccgataccaggatcttgccatcctatggaactgcctcggtgagttttctccttcattacagaaacggctttttcaaaaatatggtattgataatcctgatatgaataaattgcagtttcatttgatgctcgatgagtttttctaaaagcttgtgcaatgccacaaagaagagtcaatcgcagacaacattttgaatgcggtcacacgttagcagcatgattgccacggatggcaacatattaacggcatgatattgacttattgaataaaattgggtaaatttgactcaacgatgggttaattcgctcgttgtggtagtgagatgaaaagaggcggcgcttactaccgattccgcctagttggtcacttcgacgtatcgtctggaactccaaccatcgcaggcagagaggtctgcaaaatgcaatcccgaaacagttcgcaggtaatagttagagcctgcataacggtttcgggattttttatatctgcacaacaggtaagagcattgagtcgataatcgtgaagagtcggcgagcctggttagccagtgctctttccgttgtgctgaattaagcgaataccggaagcagaaccggatcaccaaatgcgtacaggcgtcatcgccgcccagcaacagcacaacccaaactgagccgtagccactgtctgtcctgaattcattagtaatagttacgctgcggccttttacacatgaccttcgtgaaagcgggtggcaggaggtcgcgctaacaacctcctgccgttttgcccgtgcatatcggtcacgaacaaatctgattactaaacacagtagcctggatttgttctatcagtaatcgaccttattcctaattaaatagagcaaatccccttattgggggtaagacatgaagatgccagaaaaacatgacctgttggccgccattctcgcggcaaaggaacaaggcatcggggcaatccttgcgtttgcaatggcgtaccttcgcggcagatataatggcggtgcgtttacaaaaacagtaatcgacgcaacgatgtgcgccattatcgcctggttcattcgtgaccttctcgacttcgccggactaagtagcaatctcgcttatataacgagcgtgtttatcggctacatcggtactgactcgattggttcgcttatcaaacgcttcgctgctaaaaaagccggagtagaagatggtagaaatcaataatcaacgtaaggcgttcctcgatatgctggcgtggtcggagggaactgataacggacgtcagaaaaccagaaatcatggttatgacgtcattgtaggcggagagctatttactgattactccgatcaccctcgcaaacttgtcacgctaaacccaaaactcaaatcaacaggcgccggacgctaccagcttctttcccgttggtgggatgcctaccgcaagcagcttggcctgaaagacttctctccgaaaagtcaggacgctgtggcattgcagcagattaaggagcgtggcgctttacctatgattgatcgtggtgatatccgtcaggcaatcgaccgttgcagcaatatctgggcttcactgccgggcgctggttatggtcagttcgagcataaggctgacagcctgattgcaaaattcaaagaagcgggcggaacggtcagagagattgatgtatgagcagagtcaccgcgattatctccgctctggttatctgcatcatcgtctgcctgtcatgggctgttaatcattaccgtgataacgccattacctacaaagcccagcgcgacaaaaatgccagagaactgaagctggcgaacgcggcaattactgacatgcagatgcgtcagcgtgatgttgctgcgctcgatgcaaaatacacgaaggagttagctgatgctaaagctgaaaatgatgctctgcgtgatgatgttgccgctggtcgtcgtcggttgcacatcaaagcagtctgtcagtcagtgcgtgaagccaccaccgcctccggcgtggataatgcagcctccccccgactggcagacaccgctgaacgggattatttcaccctcagagagaggctgatcactatgcaaaaacaactggaaggaacccagaagtatattaatgagcagtgcagatagagttgcccatatcgatgggcaactcatgcaattattgtgagcaatacacacgcgcttccagcggagtataaatgcctaaagtaataaaaccgagcaatccatttacgaatgtttgctgggtttctgttttaacaacattttctgcgccgccacaaattttggctgcatcgacagttttcttctgcccaattccagaaacgaagaaatgatgggtgatggtttcctttggtgctactgctgccggtttgttttgaacagtaaacgtctgttgagcacatcctgtaataagcagggccagcgcagtagcgagtagcatttttttcatggtgttattcccgatgctttttgaagttcgcagaatcgtatgtgtagaaaattaaacaaaccctaaacaatgagttgaaatttcatattgttaatatttattaatgtatgtcaggtgcgatgaatcgtcattgtattcccggattaactatgtccacagccctgacggggaacttctctgcgggagtgtccgggaataattaaaacgatgcacacagggtttagcgcgtacacgtattgcattatgccaacgccccggtgctgacacggaagaaaccggacgttatgatttagcgtggaaagatttgtgtagtgttctgaatgctctcagtaaatagtaatgaattatcaaaggtatagtaatatcttttatgttcatggatatttgtaacccatcggaaaactcctgctttagcaagattttccctgtattgctgaaatgtgatttctcttgatttcaacctatcataggacgtttctataagatgcgtgtttcttgagaatttaacatttacaacctttttaagtccttttattaacacggtgttatcgttttctaacacgatgtgaatattatctgtggctagatagtaaatataatgtgagacgttgtgacgtttgctagcctgtcagaccaagtttactcatatatactttagattgatttaaaacttcatttttaatttaaaaggatctaggtgaagatcctttttgataatctcatgaccaaaatcccttaacgtgagttttcgttccactgagcgtcagaccccgtagaaaagatcaaaggatcttcttgagatcctttttttctgcgcgtaatctgctgcttgcaaacaaaaaaaccaccgctaccagcggtggtttgtttgccggatcaagagctaccaactctttttccgaaggtaactggcttcagcagagcgcagataccaaatactgttcttctagtgtagccgtagttaggccaccacttcaagaactctgtagcaccgcctacatacctcgctctgctaatcctgttaccagtggctgctgccagtggcgataagtcgtgtcttaccgggttggactcaagacgatagttaccggataaggcgcagcggtcgggctgaacggggggttcgtgcacacagcccagcttggagcgaacgacctacaccgaactgagatacctacagcgtgagctatgagaaagcgccacgcttcccgaagggagaaaggcggacaggtatccggtaagcggcagggtcggaacaggagagcgcacgagggagcttccagggggaaacgcctggtatctttatagtcctgtcgggtttcgccacctctgacttgagcgtcgatttttgtgatgctcgtcaggggggcggagcctatggaaaaacgccagcaacgcggcctttttacggttcctggccttttgctggccttttgctcacatgttctttcctgcgttatcccctgattctgtggataaccgtattaccgcctttgagtgagctgataccgctcgccgcagccgaacgaccgagcgcagcgagtcagtgagcgaggaagcggaagagcgcccaatacgcaaaccgcctctccccgcgcgttggccgattcattaatgcagctggcacgacaggtttcccgactggaaagcgggcagtgagcgcaacgcaattaatgtgagttagctcactcattaggcaccccaggctttacactttatgcttccggctcgtatgttgtgtggaattgtgagcggataacaatttcacacaggaaacagctatgaccatgattacgccaagtttgcacgcctgccgttcgacgatttcgcgagttggttcagctgctgcctgaggctggacgacctcgcggagttctaccggcagtgcaaatccgtcggcatccaggaaaccagcagcggctatccgcgcatccatgcccccgaactgcaggagtggggaggcacgatggccgctttggtccggatctttgtgaaggaaccttacttctgtggtgtgacataattggacaaactacctacagagatttaaagctctaaggtaaatataaaatttttaagtgtataatgtgttaaactactgattctaattgtttgtgtattttagattccaacctatggaactgatgaatgggagcagtggtggaatgcctttaatgaggaaaacctgttttgctcagaagaaatgccatctagtgatgatgaggctactgctgactctcaacattctactcctccaaaaaagaagagaaaggtagaagaccccaaggactttccttcagaattgctaagttttttgagtcatgctgtgtttagtaatagaactcttgcttgctttgctatttacaccacaaaggaaaaagctgcactgctatacaagaaaattatggaaaaatattctgtaacctttataagtaggcataacagttataatcataacatactgttttttcttactccacacaggcatagagtgt

SEQ ID NO: 77 - DNA, 10477 bp, synthetic construct
  source 1..10477: mol_type = other DNA
ctgctattaataactatgctcaaaaattgtgtacctttagctttttaatttgtaaaggggttaataaggaatatttgatgtatagtgccttgactagagatcataatcagccataccacatttgtagaggttttacttgctttaaaaaacctcccacacctccccctgaacctgaaacataaaatgaatgcaattgttgttgttctagcttggccactccctctctgcgcgctcgctcgctcactgaggccgggcgaccaaaggtcgcccgacgcccgggctttgcccgggcggcctcagtgagcgagcgagcgcgcagagagggagtggccaactccatcactaggggttcctctcgaggagcttggcccattgcatacgttgtatccatatcataatatgtacatttatattggctcatgtccaacattaccgccatgttactagtgtcgacattgattattgactagttattaatagtaatcaattacggggtcattagttcatagcccatatatggagttccgcgttacataacttacggtaaatggcccgcctggctgaccgcccaacgacccccgcccattgacgtcaataatgacgtatgttcccatagtaacgccaatagggactttccattgacgtcaatgggtggagtatttacggtaaactgcccacttggcagtacatcaagtgtatcatatgccaagtacgccccctattgacgtcaatgacggtaaatggcccgcctggcattatgcccagtacatgaccttatgggactttcctacttggcagtacatctacgtattagtcatcgctattaccatggtcgaggtgagccccacgttctgcttcactctccccatctcccccccctccccacccccaattttgtatttatttattttttaattattttgtgcagcgatgggggcggggggggggggggggcgcgcgccaggcggggcggggcggggcgaggggcggggcggggcgaggcggagaggtgcggcggcagccaatcagagcggcgcgctccgaaagtttccttttatggcgaggcggcggcggcggcggccctataaaaagcgaagcgcgcggcgggcgggagtcgctgcgcgctgccttcgccccgtgccccgctccgccgccgcctcgcgccgcccgccccggctctgactgaccgcgttactcccacaggtgagcgggcgggacggcccttctcctccgggctgtaattagcgcttggtttaatgacggcttgtttcttttctgtggctgcgtgaaagccttgaggggctccgggagggccctttgtgcggggggagcggctcggggggtgcgtgcgtgtgtgtgtgcgtggggagcgccgcgtgcggctccgcgctgcccggcggctgtgagcgctgcgggcgcggcgcggggctttgtgcgctccgcagtgtgcgcgaggggagcgcggccgggggcggtgccccgcggtgcggggggggctgcgaggggaacaaaggctgcgtgcggggtgtgtgcgtgggggggtgagcagggggtgtgggcgcgtcggtcgggctgcaaccccccctgcacccccctccccgagttgctgagcacggcccggcttcgggtgcggggctccgtacggggcgtggcgcggggctcgccgtgccgggcggggggtggcggcaggtgggggtgccgggcggggcggggccgcctcgggccggggagggctcgggggaggggcgcggcggcccccggagcgccggcggctgtcgaggcgcggcgagccgcagccattgccttttatggtaatcgtgcgagagggcgcagggacttcctttgtcccaaatctgtgcggagccgaaatctgggaggcgccgccgcaccccctctagcgggcgcggggcgaagcggtgcggcgccggcaggaaggaaatgggcggggagggccttcgtgcgtcgccgcgccgccgtccccttctccctctccagcctcggggctgtccgcggggggacggctgccttcgggggggacggggcagggcggggttcggcttctggcgtgtgaccggcggctctagagcctctgctaaccatgttcatgccttcttctttttcctacagctcctgggcaacgtgctggttattgtgctgtctcatcattttggcaaagaattcggcgcgccgccaccatgagcacagcagtgttggagaaccctggcctgggcaggaaactgtctgactttggccaggaaaccagctacattgaggataactgtaaccagaatggagccatcagcctgatcttcagcctgaaagaggaggtgggggccctggccaaggtgctgagactgtttgaggaaaatgatgtcaacctgacccacattgagtccagacccagcagactcaagaaagatgaatatgagttcttcacacacctggacaagagaagcctgcctgccctgaccaacatcatcaagatcctgagacatgacataggagccacagtgcatgaactgagcagagacaagaagaaggacacagtgccctggttccctagaaccatccaggaactggacagatttgccaaccagatcctgagttatggagctgagctggatgctgaccacccaggcttcaaggaccctgtgtacagagccagaaggaagcagtttgctgacattgcctacaactacagacacggccagcctatccccagagtggaatacatggaagaggagaagaagacctggggcactgtgttcaagacccttaagtctctgtacaaaacccacgcctgctatgaatacaaccacatcttccctctgctggagaagtactgtggcttccacgaagacaatatcccccagctggaggatgtgagccagttcctgcaaacctgcactggcttcagactgagacctgtggcaggcctgctgagcagcagagacttcctgggtggcctggccttcagagtcttccactgtacccagtacatcaggcatggcagcaagcccatgtacacaccagagcctgacatctgccacgagctgctgggccatgtgcctctgttctcagacagaagctttgcccagttctcccaggagattggcttagcctccttaggagcccctgatgaatacatagagaaactggccaccatctactggttcacagtggagtttggcctgtgcaagcaaggtgacagcatcaaggcctatggagctggcctgctgagcagctttggagaacttcagtactgcctctctgagaagcccaaactgctgcctctggaactggagaagacagccatccagaactacacagtgacagaattccaacctctgtactatgttgctgagagcttcaatgatgccaaagagaaggtgagaaactttgctgccaccatccccagacccttctctgtgaggtatgacccttacacccagagaattgaagtgctggataacacccagcagctgaagatcctagctgacagcatcaactctgagataggcatcctgtgctctgccctgcaaaagatcaagtgaagatctgcctcgactgtgccttctagttgccagccatctgttgtttgcccctcccccgtgccttccttgaccctggaaggtgccactcccactgtcctttcctaataaaatgaggaaattgcatcgcattgtctgagtaggtgtcattctattctggggggtggggtggggcaggacagcaagggggaggattgggaagacaatagcaggcatgctggggatgcggtgggctctatggatcccctaactacaaggaacccctagtgatggagttggccactccctctctgcgcgctcgctcgctcactgaggccgggcgaccaaaggtcgcccgacgcccgggctttgcccgggcggcctcagtgagcgagcgagcgcgcagagagggagtggccaacaggaagctcctctgtgtcctcataaaccctaacctcctctacttgagaggacattccaatcataggctgcccatccaccctctgtgtcctcctgttaattaggtcacttaacaaaaaggaaattgggtaggggtttttcacagaccgctttctaagggtaattttaaaatatctgggaagtcccttccactgctgtgttccagaagtgttggtaaacagcccacaaatgtcaacagcagaaacatacaagctgtcagctttgcacaagggcccaatctctggaagatccgcgcgtaccgagttctaattcactggccgtcgttttacaacgtcgtgactgggaaaaccctggcgttacccaacttaatcgccttgcagcacatccccctttcgccagctggcgtaatagcgaagaggcccgcaccgatcgcccttcccaacagttgcgcagcctgaatggcgaatggcgcctgatgcggtattttctccttacgcatctgtgcggtatttcacaccgcatatggtgcactctcagtacaatctgctctgatgccgcatagttaagccagccccgacacccgccaacacccgctgacgcgccctgacgggcttgtctgctcccggcatccgcttacagacaagctgtgaccgtctccgggagctgcatgtgtcagaggttttcaccgtcatcaccgaaacgcgcgagacgaaagggcctcgtgatacgcctatttttataggttaatgtcatgataataatggtttcttagacgtcaggtggcacttttcggggaaatgtgcgcggaacccccatttgtttatttttctaaatacattcaaatatgtatccgctcatgagacaataaccctgataaatgcttcaataatattgaaaaaggaagagtatgagccatattcaacgggaaacgtcttgctctaggccgcgattaaattccaacatggatgctgatttatatgggtataaatgggctcgcgataatgtcgggcaatcaggtgcgacaatctatcgattgtatgggaagcccgatgcgccagagttgtttctgaaacatggcaaaggtagcgttgccaatgatgttacagatgagatggtcagactaaactggctgacggaatttatgcctcttccgaccatcaagcattttatccgtactcctgatgatgcatggttactcaccactgcgatccctgggaaaacagcattccaggtattagaagaatatcctgattcaggtgaaaatattgttgatgcgctggcagtgttcctgcgccggttgcattcgattcctgtttgtaattgtccttttaacagcgatcgcgtatttcgtctcgctcaggcgcaatcacgaatgaataacggtttggttgatgcgagtgattttgatgacgagcgtaatggctggcctgttgaacaagtctggaaagaaatgcataaacttttgccattctcaccggattcagtcgtcactcatggtgatttctcacttgataaccttatttttgacgaggggaaattaataggttgtattgatgttggacgagtcggaatcgcagaccgataccaggatcttgccatcctatggaactgcctcggtgagttttctccttcattacagaaacggctttttcaaaaatatggtattgataatcctgatatgaataaattgcagtttcatttgatgctcgatgagtttttctaaaagcttgtgcaatgccacaaagaagagtcaatcgcagacaacattttgaatgcggtcacacgttagcagcatgattgccacggatggcaacatattaacggcatgatattgacttattgaataaaattgggtaaatttgactcaacgatgggttaattcgctcgttgtggtagtgagatgaaaagaggcggcgcttactaccgattccgcctagttggtcacttcgacgtatcgtctggaactccaaccatcgcaggcagagaggtctgcaaaatgcaatcccgaaacagttcgcaggtaatagttagagcctgcataacggtttcgggattttttatatctgcacaacaggtaagagcattgagtcgataatcgtgaagagtcggcgagcctggttagccagtgctctttccgttgtgctgaattaagcgaataccggaagcagaaccggatcaccaaatgcgtacaggcgtcatcgccgcccagcaacagcacaacccaaactgagccgtagccactgtctgtcctgaattcattagtaatagttacgctgcggccttttacacatgaccttcgtgaaagcgggtggcaggaggtcgcgctaacaacctcctgccgttttgcccgtgcatatcggtcacgaacaaatctgattactaaacacagtagcctggatttgttctatcagtaatcgaccttattcctaattaaatagagcaaatccccttattgggggtaagacatgaagatgccagaaaaacatgacctgttggccgccattctcgcggcaaaggaacaaggcatcggggcaatccttgcgtttgcaatggcgtaccttcgcggcagatataatggcggtgcgtttacaaaaacagtaatcgacgcaacgatgtgcgccattatcgcctggttcattcgtgaccttctcgacttcgccggactaagtagcaatctcgcttatataacgagcgtgtttatcggctacatcggtactgactcgattggttcgcttatcaaacgcttcgctgctaaaaaagccggagtagaagatggtagaaatcaataatcaacgtaaggcgttcctcgatatgctggcgtggtcggagggaactgataacggacgtcagaaaaccagaaatcatggttatgacgtcattgtaggcggagagctatttactgattactccgatcaccctcgcaaacttgtcacgctaaacccaaaactcaaatcaacaggcgccggacgctaccagcttctttcccgttggtgggatgcctaccgcaagcagcttggcctgaaagacttctctccgaaaagtcaggacgctgtggcattgcagcagattaaggagcgtggcgctttacctatgattgatcgtggtgatatccgtcaggcaatcgaccgttgcagcaatatctgggcttcactgccgggcgctggttatggtcagttcgagcataaggctgacagcctgattgcaaaattcaaagaagcgggcggaacggtcagagagattgatgtatgagcagagtcaccgcgattatctccgctctggttatctgcatcatcgtctgcctgtcatgggctgttaatcattaccgtgataacgccattacctacaaagcccagcgcgacaaaaatgccagagaactgaagctggcgaacgcggcaattactgacatgcagatgcgtcagcgtgatgttgctgcgctcgatgcaaaatacacgaaggagttagctgatgctaaagctgaaaatgatgctctgcgtgatgatgttgccgctggtcgtcgtcggttgcacatcaaagcagtctgtcagtcagtgcgtgaagccaccaccgcctccggcgtggataatgcagcctccccccgactggcagacaccgctgaacgggattatttcaccctcagagagaggctgatcactatgcaaaaacaactggaaggaacccagaagtatattaatgagcagtgcagatagagttgcccatatcgatgggcaactcatgcaattattgtgagcaatacacacgcgcttccagcggagtataaatgcctaaagtaataaaaccgagcaatccatttacgaatgtttgctgggtttctgttttaacaacattttctgcgccgccacaaattttggctgcatcgacagttttcttctgcccaattccagaaacgaagaaatgatgggtgatggtttcctttggtgctactgctgccggtttgttttgaacagtaaacgtctgttgagcacatcctgtaataagcagggccagcgcagtagcgagtagcatttttttcatggtgttattcccgatgctttttgaagttcgcagaatcgtatgtgtagaaaattaaacaaaccctaaacaatgagttgaaatttcatattgttaatatttattaatgtatgtcaggtgcgatgaatcgtcattgtattcccggattaactatgtccacagccctgacggggaacttctctgcgggagtgtccgggaataattaaaacgatgcacacagggtttagcgcgtacacgtattgcattatgccaacgccccggtgctgacacggaagaaaccggacgttatgatttagcgtggaaagatttgtgtagtgttctgaatgctctcagtaaatagtaatgaattatcaaaggtatagtaatatcttttatgttcatggatatttgtaacccatcggaaaactcctgctttagcaagattttccctgtattgctgaaatgtgatttctcttgatttcaacctatcataggacgtttctataagatgcgtgtttcttgagaatttaacatttacaacctttttaagtccttttattaacacggtgttatcgttttctaacacgatgtgaatattatctgtggctagatagtaaatataatgtgagacgttgtgacgtttgctagcctgtcagaccaagtttactcatatatactttagattgatttaaaacttcatttttaatttaaaaggatctaggtgaagatcctttttgataatctcatgaccaaaatcccttaacgtgagttttcgttccactgagcgtcagaccccgtagaaaagatcaaaggatcttcttgagatcctttttttctgcgcgtaatctgctgcttgcaaacaaaaaaaccaccgctaccagcggtggtttgtttgccggatcaagagctaccaactctttttccgaaggtaactggcttcagcagagcgcagataccaaatactgttcttctagtgtagccgtagttaggccaccacttcaagaactctgtagcaccgcctacatacctcgctctgctaatcctgttaccagtggctgctgccagtggcgataagtcgtgtcttaccgggttggactcaagacgatagttaccggataaggcgcagcggtcgggctgaacggggggttcgtgcacacagcccagcttggagcgaacgacctacaccgaactgagatacctacagcgtgagctatgagaaagcgccacgcttcccgaagggagaaaggcggacaggtatccggtaagcggcagggtcggaacaggagagcgcacgagggagcttccagggggaaacgcctggtatctttatagtcctgtcgggtttcgccacctctgacttgagcgtcgatttttgtgatgctcgtcaggggggcggagcctatggaaaaacgccagcaacgcggcctttttacggttcctggccttttgctggccttttgctcacatgttctttcctgcgttatcccctgattctgtggataaccgtattaccgcctttgagtgagctgataccgctcgccgcagccgaacgaccgagcgcagcgagtcagtgagcgaggaagcggaagagcgcccaatacgcaaaccgcctctccccgcgcgttggccgattcattaatgcagctggcacgacaggtttcccgactggaaagcgggcagtgagcgcaacgcaattaatgtgagttagctcactcattaggcaccccaggctttacactttatgcttccggctcgtatgttgtgtggaattgtgagcggataacaatttcacacaggaaacagctatgaccatgattacgccaagtttgcacgcctgccgttcgacgatttcgcgagttggttcagctgctgcctgaggctggacgacctcgcggagttctaccggcagtgcaaatccgtcggcatccaggaaaccagcagcggctatccgcgcatccatgcccccgaactgcaggagtggggaggcacgatggccgctttggtccggatctttgtgaaggaaccttacttctgtggtgtgacataattggacaaactacctacagagatttaaagctctaaggtaaatataaaatttttaagtgtataatgtgttaaactactgattctaattgtttgtgtattttagattccaacctatggaactgatgaatgggagcagtggtggaatgcctttaatgaggaaaacctgttttgctcagaagaaatgccatctagtgatgatgaggctactgctgactctcaacattctactcctccaaaaaagaagagaaaggtagaagaccccaaggactttccttcagaattgctaagttttttgagtcatgctgtgtttagtaatagaactcttgcttgctttgctatttacaccacaaaggaaaaagctgcactgctatacaagaaaattatggaaaaatattctgtaacctttataagtaggcataacagttataatcataacatactgttttttcttactccacacaggcatagagtgt

SEQ ID NO: 78 - DNA, 11416 bp, synthetic construct
  source 1..11416: mol_type = other DNA
ctgctattaataactatgctcaaaaattgtgtacctttagctttttaatttgtaaaggggttaataaggaatatttgatgtatagtgccttgactagagatcataatcagccataccacatttgtagaggttttacttgctttaaaaaacctcccacacctccccctgaacctgaaacataaaatgaatgcaattgttgttgttctagcttggccactccctctctgcgcgctcgctcgctcactgaggccgggcgaccaaaggtcgcccgacgcccgggctttgcccgggcggcctcagtgagcgagcgagcgcgcagagagggagtggccaactccatcactaggggttcctctcgaggagcttggcccattgcatacgttgtatccatatcataatatgtacatttatattggctcatgtccaacattaccgccatgttactagtgtacccattgccaagttctgacaactgtctgtctatagccaattatgcatttcttaaattagaacccccccaatatacccaaatatatatatatgtgtgcatatatatagtaagttgtaacaaagttgtgaattcatacctgaagtatctcaagtgatgcaagttttatgaatttttgtttatgccttttgggaagagttgtattgacaaattttttatgcttaaagtaaaccataaatcaaaaaaataaaatctaggatgcaataaaacaaaacaacttcttgacataagtatggtatgtaaatctgttttgattggaaatcaatttgttatattgccagaattcctgttttagaatacatctctgctgatctgtctgtattcttagactgcatatctgggatgaactctgggcagaattcacatgggcttcctttgaaataaacaagacttttcaaattcttagtcgatctgcagaacctgtagccaggcactgaaccattttgatagatgcagtaatcgttgcaagtgtatatttcaaggagttctggctgggtcctagtttatgcttgtggcagaagcagtgagtaactgggaggaagttggtgagtaagcttcaaggaagaagtcatttttagtactctggatcttcctgattttaaagcactacaaaatggtgcattttcattcttgtcaagtgataacagatatattctgatgagcctgaaatgaatatatattgtatcatttttataatatctagcaaggtttgtattttcctagaacttgaactaaatttcagttcataaaatttataaaatacttagttgttgtaaaatatttttggaatgttcacataggtgacacacaaatgtcccattttcattctttctatagtaaatatgttctgatatgtgaaggtttagcagatgcatcagcatttaatcctagaggatctggcataatcttttcccccaagaatagaaattttttctgcttatgaaagtagtacatgtttctttaaaaacaaatcaatattgacttctgcctgctgtatagcactatgcctccacctggccatgaccaggggcatgtcctggtccacctacctgaaaatgtttgcaaccagcctcctggccatgtgcacaggggctgaagttgtcccacaggtattacgggccaacctgacaatacatgaagttccaccaaagtctgagaactcagaactgagctttggggactgaaagacagcacaaacctcaaatttctcagcactggaaacctcaaaatataactgaattccataaataagattttaagtcttaaatatgtatttttaaatgtattaaaagtcaagctgcttgtatttaagcacctaatacaatgcttaggttgtaaaaggagatgctcaataggtactaactgatatattgagatttaattatggtttgaccaatatttattggaaaccgccaaagcttaaatcatcagcttcttgaatgtgatttgaaaggtaatttagtattgaatagcatgtgagctagagtatttcattctttctggtttatttcttcaaatagactttgaatataatggtgaatgggtattataaattaactaataaaaatgacattgaaaatgaaaaaatatatatattaaagtgtagaaagtgaccaggcgtcgacaggctcagaggcacacaggagtttctgggctcaccctgcccccttccaacccctcagttcccatcctccagcagctgtttgtgtgctgcctctgaagtccacactgaacaaacttcagcctactcatgtccctaaaatgggcaaacattgcaagcagcaaacagcaaacacacagccctccctgcctgctgaccttggagctggggcagaggtcagagacctctctgggcccatgccacctccaacatccactcgaccccttggaatttcggtggagaggagcagaggttgtcctggcgtggtttaggtagtgtgagaggggtcgacgatcttgctaccagtggaacagccactaaggattctgcagtgagagcagagggccagctaagtggtactctcccagagactgtctgactcacgccaccccctccaccttggacacaggacgctgtggtttctgagccaggtacaatgactcctttcggtaagtgcagtggaagctgtacactgcccaggcaaagcgtccgggcagcgtaggcgggcgactcagatcccagccagtggacttagcccctgtttgctcctccgataactggggtgaccttggttaatattcaccagcagcctcccccgttgcccctctggatccactgcttaaatacggacgaggacagggccctgtctcctcagcttcaggcaccaccactgacctgggacagtgaatcgtaagtatgcctttcactgcgagaggttctggagaggcttctgagctccccatggcccaggcaggcagcaggtctggggcaggaggggggttgtggagtgggtatccgcctgctgaggtgcagggcagatcatcatgtgccttgactcggggcctggcccccccatctctgtcttgcaggacaattgccgtcttctgtctcgtggggcatcctcctgctggcaggcctgtgctgcctggtccctgtctccctggctgaggaccgggtaccgccaccatgagcacagcagtgttggagaaccctggcctgggcaggaaactgtctgactttggccaggaaaccagctacattgaggataactgtaaccagaatggagccatcagcctgatcttcagcctgaaagaggaggtgggggccctggccaaggtgctgagactgtttgaggaaaatgatgtcaacctgacccacattgagtccagacccagcagactcaagaaagatgaatatgagttcttcacacacctggacaagagaagcctgcctgccctgaccaacatcatcaagatcctgagacatgacataggagccacagtgcatgaactgagcagagacaagaagaaggacacagtgccctggttccctagaaccatccaggaactggacagatttgccaaccagatcctgagttatggagctgagctggatgctgaccacccaggcttcaaggaccctgtgtacagagccagaaggaagcagtttgctgacattgcctacaactacagacacggccagcctatccccagagtggaatacatggaagaggagaagaagacctggggcactgtgttcaagacccttaagtctctgtacaaaacccacgcctgctatgaatacaaccacatcttccctctgctggagaagtactgtggcttccacgaagacaatatcccccagctggaggatgtgagccagttcctgcaaacctgcactggcttcagactgagacctgtggcaggcctgctgagcagcagagacttcctgggtggcctggccttcagagtcttccactgtacccagtacatcaggcatggcagcaagcccatgtacacaccagagcctgacatctgccacgagctgctgggccatgtgcctctgttctcagacagaagctttgcccagttctcccaggagattggcttagcctccttaggagcccctgatgaatacatagagaaactggccaccatctactggttcacagtggagtttggcctgtgcaagcaaggtgacagcatcaaggcctatggagctggcctgctgagcagctttggagaacttcagtactgcctctctgagaagcccaaactgctgcctctggaactggagaagacagccatccagaactacacagtgacagaattccaacctctgtactatgttgctgagagcttcaatgatgccaaagagaaggtgagaaactttgctgccaccatccccagacccttctctgtgaggtatgacccttacacccagagaattgaagtgctggataacacccagcagctgaagatcctagctgacagcatcaactctgagataggcatcctgtgctctgccctgcaaaagatcaagtgaagatctgcctcgactgtgccttctagttgccagccatctgttgtttgcccctcccccgtgccttccttgaccctggaaggtgccactcccactgtcctttcctaataaaatgaggaaattgcatcgcattgtctgagtaggtgtcattctattctggggggtggggtggggcaggacagcaagggggaggattgggaagacaatagcaggcatgctggggatgcggtgggctctatggatcccctaactacaaggaacccctagtgatggagttggccactccctctctgcgcgctcgctcgctcactgaggccgggcgaccaaaggtcgcccgacgcccgggctttgcccgggcggcctcagtgagcgagcgagcgcgcagagagggagtggccaacaggaagctcctctgtgtcctcataaaccctaacctcctctacttgagaggacattccaatcataggctgcccatccaccctctgtgtcctcctgttaattaggtcacttaacaaaaaggaaattgggtaggggtttttcacagaccgctttctaagggtaattttaaaatatctgggaagtcccttccactgctgtgttccagaagtgttggtaaacagcccacaaatgtcaacagcagaaacatacaagctgtcagctttgcacaagggcccaatctctggaagatccgcgcgtaccgagttctaattcactggccgtcgttttacaacgtcgtgactgggaaaaccctggcgttacccaacttaatcgccttgcagcacatccccctttcgccagctggcgtaatagcgaagaggcccgcaccgatcgcccttcccaacagttgcgcagcctgaatggcgaatggcgcctgatgcggtattttctccttacgcatctgtgcggtatttcacaccgcatatggtgcactctcagtacaatctgctctgatgccgcatagttaagccagccccgacacccgccaacacccgctgacgcgccctgacgggcttgtctgctcccggcatccgcttacagacaagctgtgaccgtctccgggagctgcatgtgtcagaggttttcaccgtcatcaccgaaacgcgcgagacgaaagggcctcgtgatacgcctatttttataggttaatgtcatgataataatggtttcttagacgtcaggtggcacttttcggggaaatgtgcgcggaacccccatttgtttatttttctaaatacattcaaatatgtatccgctcatgagacaataaccctgataaatgcttcaataatattgaaaaaggaagagtatgagccatattcaacgggaaacgtcttgctctaggccgcgattaaattccaacatggatgctgatttatatgggtataaatgggctcgcgataatgtcgggcaatcaggtgcgacaatctatcgattgtatgggaagcccgatgcgccagagttgtttctgaaacatggcaaaggtagcgttgccaatgatgttacagatgagatggtcagactaaactggctgacggaatttatgcctcttccgaccatcaagcattttatccgtactcctgatgatgcatggttactcaccactgcgatccctgggaaaacagcattccaggtattagaagaatatcctgattcaggtgaaaatattgttgatgcgctggcagtgttcctgcgccggttgcattcgattcctgtttgtaattgtccttttaacagcgatcgcgtatttcgtctcgctcaggcgcaatcacgaatgaataacggtttggttgatgcgagtgattttgatgacgagcgtaatggctggcctgttgaacaagtctggaaagaaatgcataaacttttgccattctcaccggattcagtcgtcactcatggtgatttctcacttgataaccttatttttgacgaggggaaattaataggttgtattgatgttggacgagtcggaatcgcagaccgataccaggatcttgccatcctatggaactgcctcggtgagttttctccttcattacagaaacggctttttcaaaaatatggtattgataatcctgatatgaataaattgcagtttcatttgatgctcgatgagtttttctaaaagcttgtgcaatgccacaaagaagagtcaatcgcagacaacattttgaatgcggtcacacgttagcagcatgattgccacggatggcaacatattaacggcatgatattgacttattgaataaaattgggtaaatttgactcaacgatgggttaattcgctcgttgtggtagtgagatgaaaagaggcggcgcttactaccgattccgcctagttggtcacttcgacgtatcgtctggaactccaaccatcgcaggcagagaggtctgcaaaatgcaatcccgaaacagttcgcaggtaatagttagagcctgcataacggtttcgggattttttatatctgcacaacaggtaagagcattgagtcgataatcgtgaagagtcggcgagcctggttagccagtgctctttccgttgtgctgaattaagcgaataccggaagcagaaccggatcaccaaatgcgtacaggcgtcatcgccgcccagcaacagcacaacccaaactgagccgtagccactgtctgtcctgaattcattagtaatagttacgctgcggccttttacacatgaccttcgtgaaagcgggtggcaggaggtcgcgctaacaacctcctgccgttttgcccgtgcatatcggtcacgaacaaatctgattactaaacacagtagcctggatttgttctatcagtaatcgaccttattcctaattaaatagagcaaatccccttattgggggtaagacatgaagatgccagaaaaacatgacctgttggccgccattctcgcggcaaaggaacaaggcatcggggcaatccttgcgtttgcaatggcgtaccttcgcggcagatataatggcggtgcgtttacaaaaacagtaatcgacgcaacgatgtgcgccattatcgcctggttcattcgtgaccttctcgacttcgccggactaagtagcaatctcgcttatataacgagcgtgtttatcggctacatcggtactgactcgattggttcgcttatcaaacgcttcgctgctaaaaaagccggagtagaagatggtagaaatcaataatcaacgtaaggcgttcctcgatatgctggcgtggtcggagggaactgataacggacgtcagaaaaccagaaatcatggttatgacgtcattgtaggcggagagctatttactgattactccgatcaccctcgcaaacttgtcacgctaaacccaaaactcaaatcaacaggcgccggacgctaccagcttctttcccgttggtgggatgcctaccgcaagcagcttggcctgaaagacttctctccgaaaagtcaggacgctgtggcattgcagcagattaaggagcgtggcgctttacctatgattgatcgtggtgatatccgtcaggcaatcgaccgttgcagcaatatctgggcttcactgccgggcgctggttatggtcagttcgagcataaggctgacagcctgattgcaaaattcaaagaagcgggcggaacggtcagagagattgatgtatgagcagagtcaccgcgattatctccgctctggttatctgcatcatcgtctgcctgtcatgggctgttaatcattaccgtgataacgccattacctacaaagcccagcgcgacaaaaatgccagagaactgaagctggcgaacgcggcaattactgacatgcagatgcgtcagcgtgatgttgctgcgctcgatgcaaaatacacgaaggagttagctgatgctaaagctgaaaatgatgctctgcgtgatgatgttgccgctggtcgtcgtcggttgcacatcaaagcagtctgtcagtcagtgcgtgaagccaccaccgcctccggcgtggataatgcagcctccccccgactggcagacaccgctgaacgggattatttcaccctcagagagaggctgatcactatgcaaaaacaactggaaggaacccagaagtatattaatgagcagtgcagatagagttgcccatatcgatgggcaactcatgcaattattgtgagcaatacacacgcgcttccagcggagtataaatgcctaaagtaataaaaccgagcaatccatttacgaatgtttgctgggtttctgttttaacaacattttctgcgccgccacaaattttggctgcatcgacagttttcttctgcccaattccagaaacgaagaaatgatgggtgatggtttcctttggtgctactgctgccggtttgttttgaacagtaaacgtctgttgagcacatcctgtaataagcagggccagcgcagtagcgagtagcatttttttcatggtgttattcccgatgctttttgaagttcgcagaatcgtatgtgtagaaaattaaacaaaccctaaacaatgagttgaaatttcatattgttaatatttattaatgtatgtcaggtgcgatgaatcgtcattgtattcccggattaactatgtccacagccctgacggggaacttctctgcgggagtgtccgggaataattaaaacgatgcacacagggtttagcgcgtacacgtattgcattatgccaacgccccggtgctgacacggaagaaaccggacgttatgatttagcgtggaaagatttgtgtagtgttctgaatgctctcagtaaatagtaatgaattatcaaaggtatagtaatatcttttatgttcatggatatttgtaacccatcggaaaactcctgctttagcaagattttccctgtattgctgaaatgtgatttctcttgatttcaacctatcataggacgtttctataagatgcgtgtttcttgagaatttaacatttacaacctttttaagtccttttattaacacggtgttatcgttttctaacacgatgtgaatattatctgtggctagatagtaaatataatgtgagacgttgtgacgtttgctagcctgtcagaccaagtttactcatatatactttagattgatttaaaacttcatttttaatttaaaaggatctaggtgaagatcctttttgataatctcatgaccaaaatcccttaacgtgagttttcgttccactgagcgtcagaccccgtagaaaagatcaaaggatcttcttgagatcctttttttctgcgcgtaatctgctgcttgcaaacaaaaaaaccaccgctaccagcggtggtttgtttgccggatcaagagctaccaactctttttccgaaggtaactggcttcagcagagcgcagataccaaatactgttcttctagtgtagccgtagttaggccaccacttcaagaactctgtagcaccgcctacatacctcgctctgctaatcctgttaccagtggctgctgccagtggcgataagtcgtgtcttaccgggttggactcaagacgatagttaccggataaggcgcagcggtcgggctgaacggggggttcgtgcacacagcccagcttggagcgaacgacctacaccgaactgagatacctacagcgtgagctatgagaaagcgccacgcttcccgaagggagaaaggcggacaggtatccggtaagcggcagggtcggaacaggagagcgcacgagggagcttccagggggaaacgcctggtatctttatagtcctgtcgggtttcgccacctctgacttgagcgtcgatttttgtgatgctcgtcaggggggcggagcctatggaaaaacgccagcaacgcggcctttttacggttcctggccttttgctggccttttgctcacatgttctttcctgcgttatcccctgattctgtggataaccgtattaccgcctttgagtgagctgataccgctcgccgcagccgaacgaccgagcgcagcgagtcagtgagcgaggaagcggaagagcgcccaatacgcaaaccgcctctccccgcgcgttggccgattcattaatgcagctggcacgacaggtttcccgactggaaagcgggcagtgagcgcaacgcaattaatgtgagttagctcactcattaggcaccccaggctttacactttatgcttccggctcgtatgttgtgtggaattgtgagcggataacaatttcacacaggaaacagctatgaccatgattacgccaagtttgcacgcctgccgttcgacgatttcgcgagttggttcagctgctgcctgaggctggacgacctcgcggagttctaccggcagtgcaaatccgtcggcatccaggaaaccagcagcggctatccgcgcatccatgcccccgaactgcaggagtggggaggcacgatggccgctttggtccggatctttgtgaaggaaccttacttctgtggtgtgacataattggacaaactacctacagagatttaaagctctaaggtaaatataaaatttttaagtgtataatgtgttaaactactgattctaattgtttgtgtattttagattccaacctatggaactgatgaatgggagcagtggtggaatgcctttaatgaggaaaacctgttttgctcagaagaaatgccatctagtgatgatgaggctactgctgactctcaacattctactcctccaaaaaagaagagaaaggtagaagaccccaaggactttccttcagaattgctaagttttttgagtcatgctgtgtttagtaatagaactcttgcttgctttgctatttacaccacaaaggaaaaagctgcactgctatacaagaaaattatggaaaaatattctgtaacctttataagtaggcataacagttataatcataacatactgttttttcttactccacacaggcatagagtgt

SEQ ID NO: 79 - DNA, 4697 bp, synthetic construct
  source 1..4697: mol_type = other DNA
ttggccactccctctctgcgcgctcgctcgctcactgaggccgggcgaccaaaggtcgcccgacgcccgggctttgcccgggcggcctcagtgagcgagcgagcgcgcagagagggagtggccaactccatcactaggggttcctctcgaggagcttggcccattgcatacgttgtatccatatcataatatgtacatttatattggctcatgtccaacattaccgccatgttactagtgtcgacaggctcagaggcacacaggagtttctgggctcaccctgcccccttccaacccctcagttcccatcctccagcagctgtttgtgtgctgcctctgaagtccacactgaacaaacttcagcctactcatgtccctaaaatgggcaaacattgcaagcagcaaacagcaaacacacagccctccctgcctgctgaccttggagctggggcagaggtcagagacctctctgggcccatgccacctccaacatccactcgaccccttggaatttcggtggagaggagcagaggttgtcctggcgtggtttaggtagtgtgagaggggtcgacgatcttgctaccagtggaacagccactaaggattctgcagtgagagcagagggccagctaagtggtactctcccagagactgtctgactcacgccaccccctccaccttggacacaggacgctgtggtttctgagccaggtacaatgactcctttcggtaagtgcagtggaagctgtacactgcccaggcaaagcgtccgggcagcgtaggcgggcgactcagatcccagccagtggacttagcccctgtttgctcctccgataactggggtgaccttggttaatattcaccagcagcctcccccgttgcccctctggatccactgcttaaatacggacgaggacagggccctgtctcctcagcttcaggcaccaccactgacctgggacagtgaatcgtaagtatgcctttcactgcgagaggttctggagaggcttctgagctccccatggcccaggcaggcagcaggtctggggcaggaggggggttgtggagtgggtatccgcctgctgaggtgcagggcagatcatcatgtgccttgactcggggcctggcccccccatctctgtcttgcaggacaattgccgtcttctgtctcgtggggcatcctcctgctggcaggcctgtgctgcctggtccctgtctccctggctgaggaccgggtaccgccaccatgagcactgctgtgctggagaacccaggcctaggcagaaagctctcagactttggccaggaaaccagctacatagaggacaactgcaaccagaatggagccatctccctgatcttcagcctgaaggaggaagtgggagccctggccaaggtgctgagactgtttgaagagaatgatgtgaacctgacccacattgagagcagacccagcagactgaagaaggatgaatatgagttcttcacccacctggacaaaagaagcctgccagcccttaccaatatcatcaagatcctgagacatgacattggggccacagtgcatgagctgtccagagacaaaaaaaaggacacagtgccatggttccccaggaccatccaggagctggacagatttgccaaccagatcctgagctatggtgctgaactggatgcagatcaccctggcttcaaagaccctgtgtacagggccagaagaaagcagtttgctgacattgcctacaactacaggcatggccagcctatccccagagtggagtacatggaggaggagaagaagacctggggcacagtgttcaagacactgaagagcctgtacaagacccatgcctgctatgaatacaaccacatcttccctctcctggagaaatactgtggcttccatgaggacaacatccctcagctggaggatgtgagccaattcctgcagacctgcacaggcttcagactgagacctgttgctggcctgctgagcagcagagacttccttggaggcttagccttcagagtcttccactgcacccagtacatcagacatggctccaagcctatgtacacccctgagcctgacatctgccatgagctgctgggccatgtccccctgttctctgacagatcctttgcccaattcagccaggaaataggcctggcctccctgggagcccctgatgaatacatagaaaagctggccaccatctactggttcacagtggaatttggcctgtgcaaacagggagatagcatcaaggcctatggagcaggcctgctgagcagctttggagagctgcaatactgtctgtctgagaagcctaagctgctgcccctggaactggaaaagacagccatccagaactacacagtgacagaattccagcctctgtactatgtggctgagagcttcaatgatgccaaagagaaggtgaggaactttgctgccaccatccccaggcctttctctgtgagatatgacccctacacccagaggattgaggtgctggacaacacccagcagctgaagatcttagctgactctatcaactctgaaattggcatcctgtgttctgccctgcagaagatcaagtgaagatctgcctcgactgtgccttctagttgccagccatctgttgtttgcccctcccccgtgccttccttgaccctggaaggtgccactcccactgtcctttcctaataaaatgaggaaattgcatcgcattgtctgagtaggtgtcattctattctggggggtggggtggggcaggacagcaagggggaggattgggaagacaatagcaggcatgctggggatgcggtgggctctatggggcgcgccgtacccattgccaagttctgacaactgtctgtctatagccaattatgcatttcttaaattagaacccccccaatatacccaaatatatatatatgtgtgcatatatatagtaagttgtaacaaagttgtgaattcatacctgaagtatctcaagtgatgcaagttttatgaatttttgtttatgccttttgggaagagttgtattgacaaattttttatgcttaaagtaaaccataaatcaaaaaaataaaatctaggatgcaataaaacaaaacaacttcttgacataagtatggtatgtaaatctgttttgattggaaatcaatttgttatattgccagaattcctgttttagaatacatctctgctgatctgtctgtattcttagactgcatatctgggatgaactctgggcagaattcacatgggcttcctttgaaataaacaagacttttcaaattcttagtcgatctgcagaacctgtagccaggcactgaaccattttgatagatgcagtaatcgttgcaagtgtatatttcaaggagttctggctgggtcctagtttatgcttgtggcagaagcagtgagtaactgggaggaagttggtgagtaagcttcaaggaagaagtcatttttagtactctggatcttcctgattttaaagcactacaaaatggtgcattttcattcttgtcaagtgataacagatatattctgatgagcctgaaatgaatatatattgtatcatttttataatatctagcaaggtttgtattttcctagaacttgaactaaatttcagttcataaaatttataaaatacttagttgttgtaaaatatttttggaatgttcacataggtgacacacaaatgtcccattttcattctttctatagtaaatatgttctgatatgtgaaggtttagcagatgcatcagcatttaatcctagaggatctggcataatcttttcccccaagaatagaaattttttctgcttatgaaagtagtacatgtttctttaaaaacaaatcaatattgacttctgcctgctgtatagcactatgcctccacctggccatgaccaggggcatgtcctggtccacctacctgaaaatgtttgcaaccagcctcctggccatgtgcacaggggctgaagttgtcccacaggtattacgggccaacctgacaatacatgaagttccaccaaagtctgagaactcagaactgagctttggggactgaaagacagcacaaacctcaaatttctcagcactggaaacctcaaaatataactgaattccataaataagattttaagtcttaaatatgtatttttaaatgtattaaaagtcaagctgcttgtatttaagcacctaatacaatgcttaggttgtaaaaggagatgctcaataggtactaactgatatattgagatttaattatggtttgaccaatatttattggaaaccgccaaagcttaaatcatcagcttcttgaatgtgatttgaaaggtaatttagtattgaatagcatgtgagctagagtatttcattctttctggtttatttcttcaaatagactttgaatataatggtgaatgggtattataaattaactaataaaaatgacattgaaaatgaaaaaatatatatattaaagtgtagaaagtgaccaggcaccggtggatcccctaactacaaggaacccctagtgatggagttggccactccctctctgcgcgctcgctcgctcactgaggccgggcgaccaaaggtcgcccgacgcccgggctttgcccgggcggcctcagtgagcgagcgagcgcgcagagagggagtggccaa

SEQ ID NO: 80 - DNA, 4697 bp, synthetic construct
  source 1..4697: mol_type = other DNA
ttggccactccctctctgcgcgctcgctcgctcactgaggccgggcgaccaaaggtcgcccgacgcccgggctttgcccgggcggcctcagtgagcgagcgagcgcgcagagagggagtggccaactccatcactaggggttcctctcgaggagcttggcccattgcatacgttgtatccatatcataatatgtacatttatattggctcatgtccaacattaccgccatgttactagtgtcgacaggctcagaggcacacaggagtttctgggctcaccctgcccccttccaacccctcagttcccatcctccagcagctgtttgtgtgctgcctctgaagtccacactgaacaaacttcagcctactcatgtccctaaaatgggcaaacattgcaagcagcaaacagcaaacacacagccctccctgcctgctgaccttggagctggggcagaggtcagagacctctctgggcccatgccacctccaacatccactcgaccccttggaatttcggtggagaggagcagaggttgtcctggcgtggtttaggtagtgtgagaggggtcgacgatcttgctaccagtggaacagccactaaggattctgcagtgagagcagagggccagctaagtggtactctcccagagactgtctgactcacgccaccccctccaccttggacacaggacgctgtggtttctgagccaggtacaatgactcctttcggtaagtgcagtggaagctgtacactgcccaggcaaagcgtccgggcagcgtaggcgggcgactcagatcccagccagtggacttagcccctgtttgctcctccgataactggggtgaccttggttaatattcaccagcagcctcccccgttgcccctctggatccactgcttaaatacggacgaggacagggccctgtctcctcagcttcaggcaccaccactgacctgggacagtgaatcgtaagtatgcctttcactgcgagaggttctggagaggcttctgagctccccatggcccaggcaggcagcaggtctggggcaggaggggggttgtggagtgggtatccgcctgctgaggtgcagggcagatcatcatgtgccttgactcggggcctggcccccccatctctgtcttgcaggacaattgccgtcttctgtctcgtggggcatcctcctgctggcaggcctgtgctgcctggtccctgtctccctggctgaggaccgggtaccgccaccatgtccacagctgtgctggagaatcctggcctgggcagaaagctgtctgactttggccaggagaccagctacattgaagacaactgcaaccagaatggggccatcagcctcatcttcagcctgaaggaggaggtgggtgccctagccaaggtgctgagactctttgaagaaaatgatgtgaacctgacccacatagaatctagaccttccagactgaagaaggatgaatatgagttcttcacccaccttgacaagagaagcctgccagccctgaccaacatcatcaagatcctgaggcatgacataggagccacagtccatgagctgagcagagacaaaaagaaggacacagtcccttggttccctaggaccatccaggaactggacaggtttgccaaccaaatcctgagctatggagctgagctggatgctgaccacccaggcttcaaagacccagtgtacagagccagaagaaagcagtttgcagacattgcctacaactacagacatggccaacctatccccagggttgaatacatggaagaggaaaagaagacctggggcacagtgttcaagaccctgaagagcctgtacaaaacccatgcctgctatgagtacaaccacatcttccccctgcttgagaaatactgtggcttccatgaggataacatcccccagctggaggatgtgtcccagttcctgcagacctgcactggcttcagactgagacctgtggctggcctcctgagcagcagagacttcctgggaggcctggccttcagagtgttccactgcacccaatacatcaggcatggcagcaaacccatgtacacccctgagcctgatatctgtcatgaactgctgggccatgtgccactgttctctgacagaagctttgcccagttcagccaggagattggcctggccagcctgggagcccctgatgagtacattgagaagctggccaccatctactggttcacagtggaatttggcctgtgcaagcagggagacagcatcaaggcctatggagctggcctgctgagcagctttggagagctgcagtactgcctgtctgagaagcccaaactgctgcctttggagctggagaagacagccatccagaactacacagtgacagagttccagcccctgtactatgtggctgagagcttcaatgatgccaaggaaaaggtgagaaactttgctgccacaatccctaggcctttctctgtgagatatgacccctacacccagagaatagaagtgctggacaacacccagcagctgaaaatcctggctgacagcatcaacagtgagataggcatcctgtgttctgccctgcagaagatcaagtgaagatctgcctcgactgtgccttctagttgccagccatctgttgtttgcccctcccccgtgccttccttgaccctggaaggtgccactcccactgtcctttcctaataaaatgaggaaattgcatcgcattgtctgagtaggtgtcattctattctggggggtggggtggggcaggacagcaagggggaggattgggaagacaatagcaggcatgctggggatgcggtgggctctatggggcgcgccgtacccattgccaagttctgacaactgtctgtctatagccaattatgcatttcttaaattagaacccccccaatatacccaaatatatatatatgtgtgcatatatatagtaagttgtaacaaagttgtgaattcatacctgaagtatctcaagtgatgcaagttttatgaatttttgtttatgccttttgggaagagttgtattgacaaattttttatgcttaaagtaaaccataaatcaaaaaaataaaatctaggatgcaataaaacaaaacaacttcttgacataagtatggtatgtaaatctgttttgattggaaatcaatttgttatattgccagaattcctgttttagaatacatctctgctgatctgtctgtattcttagactgcatatctgggatgaactctgggcagaattcacatgggcttcctttgaaataaacaagacttttcaaattcttagtcgatctgcagaacctgtagccaggcactgaaccattttgatagatgcagtaatcgttgcaagtgtatatttcaaggagttctggctgggtcctagtttatgcttgtggcagaagcagtgagtaactgggaggaagttggtgagtaagcttcaaggaagaagtcatttttagtactctggatcttcctgattttaaagcactacaaaatggtgcattttcattcttgtcaagtgataacagatatattctgatgagcctgaaatgaatatatattgtatcatttttataatatctagcaaggtttgtattttcctagaacttgaactaaatttcagttcataaaatttataaaatacttagttgttgtaaaatatttttggaatgttcacataggtgacacacaaatgtcccattttcattctttctatagtaaatatgttctgatatgtgaaggtttagcagatgcatcagcatttaatcctagaggatctggcataatcttttcccccaagaatagaaattttttctgcttatgaaagtagtacatgtttctttaaaaacaaatcaatattgacttctgcctgctgtatagcactatgcctccacctggccatgaccaggggcatgtcctggtccacctacctgaaaatgtttgcaaccagcctcctggccatgtgcacaggggctgaagttgtcccacaggtattacgggccaacctgacaatacatgaagttccaccaaagtctgagaactcagaactgagctttggggactgaaagacagcacaaacctcaaatttctcagcactggaaacctcaaaatataactgaattccataaataagattttaagtcttaaatatgtatttttaaatgtattaaaagtcaagctgcttgtatttaagcacctaatacaatgcttaggttgtaaaaggagatgctcaataggtactaactgatatattgagatttaattatggtttgaccaatatttattggaaaccgccaaagcttaaatcatcagcttcttgaatgtgatttgaaaggtaatttagtattgaatagcatgtgagctagagtatttcattctttctggtttatttcttcaaatagactttgaatataatggtgaatgggtattataaattaactaataaaaatgacattgaaaatgaaaaaatatatatattaaagtgtagaaagtgaccaggcaccggtggatcccctaactacaaggaacccctagtgatggagttggccactccctctctgcgcgctcgctcgctcactgaggccgggcgaccaaaggtcgcccgacgcccgggctttgcccgggcggcctcagtgagcgagcgagcgcgcagagagggagtggccaa

SEQ ID NO: 81 - DNA, 4697 bp, synthetic construct
  source 1..4697: mol_type = other DNA
ttggccactccctctctgcgcgctcgctcgctcactgaggccgggcgaccaaaggtcgcccgacgcccgggctttgcccgggcggcctcagtgagcgagcgagcgcgcagagagggagtggccaactccatcactaggggttcctctcgaggagcttggcccattgcatacgttgtatccatatcataatatgtacatttatattggctcatgtccaacattaccgccatgttactagtgtcgacaggctcagaggcacacaggagtttctgggctcaccctgcccccttccaacccctcagttcccatcctccagcagctgtttgtgtgctgcctctgaagtccacactgaacaaacttcagcctactcatgtccctaaaatgggcaaacattgcaagcagcaaacagcaaacacacagccctccctgcctgctgaccttggagctggggcagaggtcagagacctctctgggcccatgccacctccaacatccactcgaccccttggaatttcggtggagaggagcagaggttgtcctggcgtggtttaggtagtgtgagaggggtcgacgatcttgctaccagtggaacagccactaaggattctgcagtgagagcagagggccagctaagtggtactctcccagagactgtctgactcacgccaccccctccaccttggacacaggacgctgtggtttctgagccaggtacaatgactcctttcggtaagtgcagtggaagctgtacactgcccaggcaaagcgtccgggcagcgtaggcgggcgactcagatcccagccagtggacttagcccctgtttgctcctccgataactggggtgaccttggttaatattcaccagcagcctcccccgttgcccctctggatccactgcttaaatacggacgaggacagggccctgtctcctcagcttcaggcaccaccactgacctgggacagtgaatcgtaagtatgcctttcactgcgagaggttctggagaggcttctgagctccccatggcccaggcaggcagcaggtctggggcaggaggggggttgtggagtgggtatccgcctgctgaggtgcagggcagatcatcatgtgccttgactcggggcctggcccccccatctctgtcttgcaggacaattgccgtcttctgtctcgtggggcatcctcctgctggcaggcctgtgctgcctggtccctgtctccctggctgaggaccgggtaccgccaccatgagcacagctgtgctggagaaccctggcctgggcaggaaactgtctgactttggccaggagaccagctacatagaggacaactgtaaccagaatggtgccatcagcctgatcttcagcctgaaggaagaagttggagccctggccaaggtgctgaggctgtttgaggagaatgatgtcaacctgacccacatagagagcagaccaagcagactcaaaaaggatgagtatgaattcttcacccacctggacaagaggagcctgcctgccctgaccaacatcatcaagatcctaaggcatgacattggagccacagtgcatgagctgagcagggacaagaagaaggacacagtgccctggttccccagaaccatccaggaactggacagatttgccaaccagatcctgagctatggtgctgagctggatgctgaccaccctggcttcaaggaccctgtgtacagagccagaaggaagcagtttgctgatattgcctacaactacagacatggccagcctatccccagagttgagtacatggaggaagagaaaaaaacctggggcacagtgttcaagaccctgaagtccctgtacaagacccatgcctgctatgagtacaaccacatcttccctctgctggaaaaatactgtggcttccatgaggacaacatccctcagctggaggatgtgtcccagttcctgcagacctgtacaggcttcagactgagacctgtggctggcctgctgagcagcagagatttcctgggaggcctggccttcagagtgttccactgcacccaatacatcagacatggcagcaagcctatgtacaccccagagcctgacatctgccatgagttgctgggccatgtgcccctgttctctgacagatcctttgcccagttctctcaggaaattggcctggccagcctgggagcccctgatgaatacattgaaaagctggccaccatctactggttcacagtggaatttggcctttgcaagcagggggactccatcaaggcctatggagctggcctgctgagcagctttggagaactgcaatactgcctgtctgaaaagcccaagctgctgcctttggagctggagaaaacagccatccagaactacacagtgactgagttccaaccactgtactatgtggctgagagcttcaatgatgccaaggaaaaggtgagaaactttgcagccacaatccctagacccttctcagtgagatatgacccttacacccagagaattgaagtgctggacaacacccagcagctcaagatcctggctgatagcatcaactctgagattggcatcctgtgctctgccctgcagaagatcaaatgaagatctgcctcgactgtgccttctagttgccagccatctgttgtttgcccctcccccgtgccttccttgaccctggaaggtgccactcccactgtcctttcctaataaaatgaggaaattgcatcgcattgtctgagtaggtgtcattctattctggggggtggggtggggcaggacagcaagggggaggattgggaagacaatagcaggcatgctggggatgcggtgggctctatggggcgcgccgtacccattgccaagttctgacaactgtctgtctatagccaattatgcatttcttaaattagaacccccccaatatacccaaatatatatatatgtgtgcatatatatagtaagttgtaacaaagttgtgaattcatacctgaagtatctcaagtgatgcaagttttatgaatttttgtttatgccttttgggaagagttgtattgacaaattttttatgcttaaagtaaaccataaatcaaaaaaataaaatctaggatgcaataaaacaaaacaacttcttgacataagtatggtatgtaaatctgttttgattggaaatcaatttgttatattgccagaattcctgttttagaatacatctctgctgatctgtctgtattcttagactgcatatctgggatgaactctgggcagaattcacatgggcttcctttgaaataaacaagacttttcaaattcttagtcgatctgcagaacctgtagccaggcactgaaccattttgatagatgcagtaatcgttgcaagtgtatatttcaaggagttctggctgggtcctagtttatgcttgtggcagaagcagtgagtaactgggaggaagttggtgagtaagcttcaaggaagaagtcatttttagtactctggatcttcctgattttaaagcactacaaaatggtgcattttcattcttgtcaagtgataacagatatattctgatgagcctgaaatgaatatatattgtatcatttttataatatctagcaaggtttgtattttcctagaacttgaactaaatttcagttcataaaatttataaaatacttagttgttgtaaaatatttttggaatgttcacataggtgacacacaaatgtcccattttcattctttctatagtaaatatgttctgatatgtgaaggtttagcagatgcatcagcatttaatcctagaggatctggcataatcttttcccccaagaatagaaattttttctgcttatgaaagtagtacatgtttctttaaaaacaaatcaatattgacttctgcctgctgtatagcactatgcctccacctggccatgaccaggggcatgtcctggtccacctacctgaaaatgtttgcaaccagcctcctggccatgtgcacaggggctgaagttgtcccacaggtattacgggccaacctgacaatacatgaagttccaccaaagtctgagaactcagaactgagctttggggactgaaagacagcacaaacctcaaatttctcagcactggaaacctcaaaatataactgaattccataaataagattttaagtcttaaatatgtatttttaaatgtattaaaagtcaagctgcttgtatttaagcacctaatacaatgcttaggttgtaaaaggagatgctcaataggtactaactgatatattgagatttaattatggtttgaccaatatttattggaaaccgccaaagcttaaatcatcagcttcttgaatgtgatttgaaaggtaatttagtattgaatagcatgtgagctagagtatttcattctttctggtttatttcttcaaatagactttgaatataatggtgaatgggtattataaattaactaataaaaatgacattgaaaatgaaaaaatatatatattaaagtgtagaaagtgaccaggcaccggtggatcccctaactacaaggaacccctagtgatggagttggccactccctctctgcgcgctcgctcgctcactgaggccgggcgaccaaaggtcgcccgacgcccgggctttgcccgggcggcctcagtgagcgagcgagcgcgcagagagggagtggccaa

SEQ ID NO: 82 - DNA, 4697 bp, synthetic construct
  source 1..4697: mol_type = other DNA
ttggccactccctctctgcgcgctcgctcgctcactgaggccgggcgaccaaaggtcgcccgacgcccgggctttgcccgggcggcctcagtgagcgagcgagcgcgcagagagggagtggccaactccatcactaggggttcctctcgaggagcttggcccattgcatacgttgtatccatatcataatatgtacatttatattggctcatgtccaacattaccgccatgttactagtgtcgacaggctcagaggcacacaggagtttctgggctcaccctgcccccttccaacccctcagttcccatcctccagcagctgtttgtgtgctgcctctgaagtccacactgaacaaacttcagcctactcatgtccctaaaatgggcaaacattgcaagcagcaaacagcaaacacacagccctccctgcctgctgaccttggagctggggcagaggtcagagacctctctgggcccatgccacctccaacatccactcgaccccttggaatttcggtggagaggagcagaggttgtcctggcgtggtttaggtagtgtgagaggggtcgacgatcttgctaccagtggaacagccactaaggattctgcagtgagagcagagggccagctaagtggtactctcccagagactgtctgactcacgccaccccctccaccttggacacaggacgctgtggtttctgagccaggtacaatgactcctttcggtaagtgcagtggaagctgtacactgcccaggcaaagcgtccgggcagcgtaggcgggcgactcagatcccagccagtggacttagcccctgtttgctcctccgataactggggtgaccttggttaatattcaccagcagcctcccccgttgcccctctggatccactgcttaaatacggacgaggacagggccctgtctcctcagcttcaggcaccaccactgacctgggacagtgaatcgtaagtatgcctttcactgcgagaggttctggagaggcttctgagctccccatggcccaggcaggcagcaggtctggggcaggaggggggttgtggagtgggtatccgcctgctgaggtgcagggcagatcatcatgtgccttgactcggggcctggcccccccatctctgtcttgcaggacaattgccgtcttctgtctcgtggggcatcctcctgctggcaggcctgtgctgcctggtccctgtctccctggctgaggaccgggtaccgccaccatgagcacagctgtgctggagaaccctggcctgggcagaaaactgtctgactttggccaggaaacctcctacatagaagacaactgcaaccagaatggagccatcagcctgatcttcagcctgaaggaggaggtaggtgccctggccaaggtgctgagactgtttgaggagaatgatgtgaacctaacccacattgagagcaggcctagcagactgaagaaggatgaatatgagttcttcacccaccttgacaaaagatcactccctgccctgaccaacatcatcaagatcctgagacatgatataggagccactgtgcatgaactgagcagggacaagaagaaggacacagtgccctggttccccagaacaatccaggagctggacagatttgccaaccagatcctgagctatggagcagaactggatgctgaccacccaggcttcaaggaccctgtgtacagagccagaagaaagcagtttgctgacattgcctacaactacagacatggccagcccatccccagggttgaatacatggaggaggaaaagaagacctggggcacagtgttcaaaaccctgaaatccctgtacaaaacccatgcctgttatgaatacaaccacatcttccccctgcttgagaagtactgtggcttccatgaagataacatccctcagctggaggatgtgagccagttcctgcagacctgcacaggcttcagactgagacctgtggctggcctgctgagcagcagggacttcttaggaggcctggccttcagagtgttccactgcacccagtacatcagacatggcagcaagcccatgtacacccctgagcctgacatctgccatgagctgctgggccatgtccctctgttctctgacagaagctttgcccaattctcccaggagattggcctggccagccttggggccccagatgagtacattgagaagctggccaccatctactggttcacagtggagtttggcctgtgcaaacagggagacagcatcaaggcctatggagctggcctgctgagcagctttggagaactgcagtactgtctgagtgaaaagcctaagctgctgccactggagctggagaagacagccatccaaaactacacagtgacagagttccagcctctgtactatgtggctgaaagcttcaatgatgccaaggaaaaggtgagaaactttgctgccaccatccctaggcctttctctgtgagatatgacccctacacccaaagaattgaggtcctggacaacacccagcagttaaaaatcctggctgactctatcaactctgaaattggcatcctgtgctctgccctgcagaagatcaagtgaagatctgcctcgactgtgccttctagttgccagccatctgttgtttgcccctcccccgtgccttccttgaccctggaaggtgccactcccactgtcctttcctaataaaatgaggaaattgcatcgcattgtctgagtaggtgtcattctattctggggggtggggtggggcaggacagcaagggggaggattgggaagacaatagcaggcatgctggggatgcggtgggctctatggggcgcgccgtacccattgccaagttctgacaactgtctgtctatagccaattatgcatttcttaaattagaacccccccaatatacccaaatatatatatatgtgtgcatatatatagtaagttgtaacaaagttgtgaattcatacctgaagtatctcaagtgatgcaagttttatgaatttttgtttatgccttttgggaagagttgtattgacaaattttttatgcttaaagtaaaccataaatcaaaaaaataaaatctaggatgcaataaaacaaaacaacttcttgacataagtatggtatgtaaatctgttttgattggaaatcaatttgttatattgccagaattcctgttttagaatacatctctgctgatctgtctgtattcttagactgcatatctgggatgaactctgggcagaattcacatgggcttcctttgaaataaacaagacttttcaaattcttagtcgatctgcagaacctgtagccaggcactgaaccattttgatagatgcagtaatcgttgcaagtgtatatttcaaggagttctggctgggtcctagtttatgcttgtggcagaagcagtgagtaactgggaggaagttggtgagtaagcttcaaggaagaagtcatttttagtactctggatcttcctgattttaaagcactacaaaatggtgcattttcattcttgtcaagtgataacagatatattctgatgagcctgaaatgaatatatattgtatcatttttataatatctagcaaggtttgtattttcctagaacttgaactaaatttcagttcataaaatttataaaatacttagttgttgtaaaatatttttggaatgttcacataggtgacacacaaatgtcccattttcattctttctatagtaaatatgttctgatatgtgaaggtttagcagatgcatcagcatttaatcctagaggatctggcataatcttttcccccaagaatagaaattttttctgcttatgaaagtagtacatgtttctttaaaaacaaatcaatattgacttctgcctgctgtatagcactatgcctccacctggccatgaccaggggcatgtcctggtccacctacctgaaaatgtttgcaaccagcctcctggccatgtgcacaggggctgaagttgtcccacaggtattacgggccaacctgacaatacatgaagttccaccaaagtctgagaactcagaactgagctttggggactgaaagacagcacaaacctcaaatttctcagcactggaaacctcaaaatataactgaattccataaataagattttaagtcttaaatatgtatttttaaatgtattaaaagtcaagctgcttgtatttaagcacctaatacaatgcttaggttgtaaaaggagatgctcaataggtactaactgatatattgagatttaattatggtttgaccaatatttattggaaaccgccaaagcttaaatcatcagcttcttgaatgtgatttgaaaggtaatttagtattgaatagcatgtgagctagagtatttcattctttctggtttatttcttcaaatagactttgaatataatggtgaatgggtattataaattaactaataaaaatgacattgaaaatgaaaaaatatatatattaaagtgtagaaagtgaccaggcaccggtggatcccctaactacaaggaacccctagtgatggagttggccactccctctctgcgcgctcgctcgctcactgaggccgggcgaccaaaggtcgcccgacgcccgggctttgcccgggcggcctcagtgagcgagcgagcgcgcagagagggagtggccaa

SEQ ID NO: 83 - DNA, 4697 bp, synthetic construct
  source 1..4697: mol_type = other DNA
ttggccactccctctctgcgcgctcgctcgctcactgaggccgggcgaccaaaggtcgcccgacgcccgggctttgcccgggcggcctcagtgagcgagcgagcgcgcagagagggagtggccaactccatcactaggggttcctctcgaggagcttggcccattgcatacgttgtatccatatcataatatgtacatttatattggctcatgtccaacattaccgccatgttactagtgtcgacaggctcagaggcacacaggagtttctgggctcaccctgcccccttccaacccctcagttcccatcctccagcagctgtttgtgtgctgcctctgaagtccacactgaacaaacttcagcctactcatgtccctaaaatgggcaaacattgcaagcagcaaacagcaaacacacagccctccctgcctgctgaccttggagctggggcagaggtcagagacctctctgggcccatgccacctccaacatccactcgaccccttggaatttcggtggagaggagcagaggttgtcctggcgtggtttaggtagtgtgagaggggtcgacgatcttgctaccagtggaacagccactaaggattctgcagtgagagcagagggccagctaagtggtactctcccagagactgtctgactcacgccaccccctccaccttggacacaggacgctgtggtttctgagccaggtacaatgactcctttcggtaagtgcagtggaagctgtacactgcccaggcaaagcgtccgggcagcgtaggcgggcgactcagatcccagccagtggacttagcccctgtttgctcctccgataactggggtgaccttggttaatattcaccagcagcctcccccgttgcccctctggatccactgcttaaatacggacgaggacagggccctgtctcctcagcttcaggcaccaccactgacctgggacagtgaatcgtaagtatgcctttcactgcgagaggttctggagaggcttctgagctccccatggcccaggcaggcagcaggtctggggcaggaggggggttgtggagtgggtatccgcctgctgaggtgcagggcagatcatcatgtgccttgactcggggcctggcccccccatctctgtcttgcaggacaattgccgtcttctgtctcgtggggcatcctcctgctggcaggcctgtgctgcctggtccctgtctccctggctgaggaccgggtaccgccaccatgagcacagctgtgctggagaacccaggcttgggcagaaagctgtctgactttggccaggagaccagctacattgaggacaactgcaaccaaaatggtgccatctccctgatcttcagcctcaaggaggaagttggagccctggccaaagtgttaagactgtttgaagaaaatgatgtgaacctgacccacattgaaagcagacctagcagactgaagaaagatgagtatgagttcttcacccacctggataagagaagcctgcctgccctgaccaacatcatcaagatcctgagacatgacataggggccacagtgcatgagctgagcagagacaaaaaaaaagacacagtgccttggttccccaggacaatccaggagctggacagatttgccaaccagatcctgagctatggagctgagctggatgctgaccaccctggcttcaaggaccctgtctacagagccaggaggaagcagtttgctgatattgcctacaactacagacatggccaacccatccctagagttgagtacatggaggaagaaaaaaagacctggggcacagtgttcaagaccctgaagagcctgtacaagacccatgcctgctatgagtacaatcacatcttccccctgctggagaagtactgtggcttccatgaagacaacatccctcagctggaagatgtgagccagttcctgcagacctgcacaggcttcagactgagacctgtggcaggcctgctgagcagcagagacttcctgggaggcctggccttcagagtgttccactgtacccaatacatcagacatggcagcaagcccatgtacaccccagagcctgacatctgccatgagctgctgggccatgtgcccctgttctctgacaggagctttgcccagttcagccaggagataggccttgccagcctgggagcccctgatgaatacatagagaagttagccaccatctactggttcacagtggaatttggcctgtgcaagcagggagactccatcaaggcctatggagcaggcctgctgtcctcttttggagagctgcagtactgcctgtctgagaagcccaagctactgcctttagagctggaaaagacagccatccagaactacacagtcacagagttccagccactgtactatgtggctgaaagcttcaatgatgccaaggagaaggtgagaaactttgctgccaccatccccagacctttctctgtgagatatgacccttacacccagaggattgaagtgctggacaacacccagcagctgaaaatcctggctgacagcatcaactctgaaattggcatcctgtgttctgccctgcagaagatcaagtgaagatctgcctcgactgtgccttctagttgccagccatctgttgtttgcccctcccccgtgccttccttgaccctggaaggtgccactcccactgtcctttcctaataaaatgaggaaattgcatcgcattgtctgagtaggtgtcattctattctggggggtggggtggggcaggacagcaagggggaggattgggaagacaatagcaggcatgctggggatgcggtgggctctatggggcgcgccgtacccattgccaagttctgacaactgtctgtctatagccaattatgcatttcttaaattagaacccccccaatatacccaaatatatatatatgtgtgcatatatatagtaagttgtaacaaagttgtgaattcatacctgaagtatctcaagtgatgcaagttttatgaatttttgtttatgccttttgggaagagttgtattgacaaattttttatgcttaaagtaaaccataaatcaaaaaaataaaatctaggatgcaataaaacaaaacaacttcttgacataagtatggtatgtaaatctgttttgattggaaatcaatttgttatattgccagaattcctgttttagaatacatctctgctgatctgtctgtattcttagactgcatatctgggatgaactctgggcagaattcacatgggcttcctttgaaataaacaagacttttcaaattcttagtcgatctgcagaacctgtagccaggcactgaaccattttgatagatgcagtaatcgttgcaagtgtatatttcaaggagttctggctgggtcctagtttatgcttgtggcagaagcagtgagtaactgggaggaagttggtgagtaagcttcaaggaagaagtcatttttagtactctggatcttcctgattttaaagcactacaaaatggtgcattttcattcttgtcaagtgataacagatatattctgatgagcctgaaatgaatatatattgtatcatttttataatatctagcaaggtttgtattttcctagaacttgaactaaatttcagttcataaaatttataaaatacttagttgttgtaaaatatttttggaatgttcacataggtgacacacaaatgtcccattttcattctttctatagtaaatatgttctgatatgtgaaggtttagcagatgcatcagcatttaatcctagaggatctggcataatcttttcccccaagaatagaaattttttctgcttatgaaagtagtacatgtttctttaaaaacaaatcaatattgacttctgcctgctgtatagcactatgcctccacctggccatgaccaggggcatgtcctggtccacctacctgaaaatgtttgcaaccagcctcctggccatgtgcacaggggctgaagttgtcccacaggtattacgggccaacctgacaatacatgaagttccaccaaagtctgagaactcagaactgagctttggggactgaaagacagcacaaacctcaaatttctcagcactggaaacctcaaaatataactgaattccataaataagattttaagtcttaaatatgtatttttaaatgtattaaaagtcaagctgcttgtatttaagcacctaatacaatgcttaggttgtaaaaggagatgctcaataggtactaactgatatattgagatttaattatggtttgaccaatatttattggaaaccgccaaagcttaaatcatcagcttcttgaatgtgatttgaaaggtaatttagtattgaatagcatgtgagctagagtatttcattctttctggtttatttcttcaaatagactttgaatataatggtgaatgggtattataaattaactaataaaaatgacattgaaaatgaaaaaatatatatattaaagtgtagaaagtgaccaggcaccggtggatcccctaactacaaggaacccctagtgatggagttggccactccctctctgcgcgctcgctcgctcactgaggccgggcgaccaaaggtcgcccgacgcccgggctttgcccgggcggcctcagtgagcgagcgagcgcgcagagagggagtggccaa

SEQ ID NO: 84 - DNA, 4697 bp, synthetic construct
  source 1..4697: mol_type = other DNA
ttggccactccctctctgcgcgctcgctcgctcactgaggccgggcgaccaaaggtcgcccgacgcccgggctttgcccgggcggcctcagtgagcgagcgagcgcgcagagagggagtggccaactccatcactaggggttcctctcgaggagcttggcccattgcatacgttgtatccatatcataatatgtacatttatattggctcatgtccaacattaccgccatgttactagtgtcgacaggctcagaggcacacaggagtttctgggctcaccctgcccccttccaacccctcagttcccatcctccagcagctgtttgtgtgctgcctctgaagtccacactgaacaaacttcagcctactcatgtccctaaaatgggcaaacattgcaagcagcaaacagcaaacacacagccctccctgcctgctgaccttggagctggggcagaggtcagagacctctctgggcccatgccacctccaacatccactcgaccccttggaatttcggtggagaggagcagaggttgtcctggcgtggtttaggtagtgtgagaggggtcgacgatcttgctaccagtggaacagccactaaggattctgcagtgagagcagagggccagctaagtggtactctcccagagactgtctgactcacgccaccccctccaccttggacacaggacgctgtggtttctgagccaggtacaatgactcctttcggtaagtgcagtggaagctgtacactgcccaggcaaagcgtccgggcagcgtaggcgggcgactcagatcccagccagtggacttagcccctgtttgctcctccgataactggggtgaccttggttaatattcaccagcagcctcccccgttgcccctctggatccactgcttaaatacggacgaggacagggccctgtctcctcagcttcaggcaccaccactgacctgggacagtgaatcgtaagtatgcctttcactgcgagaggttctggagaggcttctgagctccccatggcccaggcaggcagcaggtctggggcaggaggggggttgtggagtgggtatccgcctgctgaggtgcagggcagatcatcatgtgccttgactcggggcctggcccccccatctctgtcttgcaggacaattgccgtcttctgtctcgtggggcatcctcctgctggcaggcctgtgctgcctggtccctgtctccctggctgaggaccgggtaccgccaccatgagcacagctgtgctggaaaaccctggcttaggcagaaagctgtctgactttggccaagagaccagctacattgaggataactgcaaccagaatggagccatctctctgatcttcagcttgaaggaggaagtgggagccctagccaaggtgctgagactgtttgaggagaatgatgtgaatctgacccacattgaaagcagacctagcagactgaagaaggatgaatatgaattcttcacccacctggacaaaagaagcctaccagccctgaccaacatcatcaagatcctgaggcatgacataggagccacagtgcatgagctgtccagggacaaaaaaaaggacacagtgccttggttccccagaacaatccaggagctggacagatttgccaaccaaatcctcagctatggagctgaactggatgctgaccaccctggcttcaaggacccagtgtacagggccagaagaaagcagtttgctgacatagcctacaactacaggcatggccaacctatccctagggtggagtacatggaggaagaaaagaagacctggggcacagtgttcaagaccctgaaaagcctgtacaagacccatgcctgctatgaatacaaccacatcttccctctgctggagaagtactgtggcttccatgaagacaacatccctcagctggaggatgtgagccagttcctgcagacctgcacaggcttcagactgaggccagtggctggcctgctgagcagcagagacttcctggggggcctggccttcagagtgttccactgcacccagtacatcagacacggcagcaagcctatgtacacccctgaacctgacatctgccatgagctcctgggccatgtgcccctgttctctgatagatcctttgcccagttcagccaggaaattggcctggccagcctgggtgcccctgatgaatacattgaaaagctggcaaccatctactggttcacagttgagtttggcctgtgtaaacagggagacagcatcaaggcctatggagcaggcctgctgtccagctttggagagctgcagtactgtctgagtgagaaacctaagctgctgcccctggagctggagaagacagccatccagaactacacagtgactgagttccagcccctgtactatgttgctgagagcttcaatgatgccaaggagaaggtgagaaactttgcagccaccatccccagacccttctcagtcagatatgacccttacacccagagaattgaggtgcttgacaacacccagcagctgaagatcctggctgactctatcaactctgaaattggcatcctctgctctgccttgcagaaaatcaagtgaagatctgcctcgactgtgccttctagttgccagccatctgttgtttgcccctcccccgtgccttccttgaccctggaaggtgccactcccactgtcctttcctaataaaatgaggaaattgcatcgcattgtctgagtaggtgtcattctattctggggggtggggtggggcaggacagcaagggggaggattgggaagacaatagcaggcatgctggggatgcggtgggctctatggggcgcgccgtacccattgccaagttctgacaactgtctgtctatagccaattatgcatttcttaaattagaacccccccaatatacccaaatatatatatatgtgtgcatatatatagtaagttgtaacaaagttgtgaattcatacctgaagtatctcaagtgatgcaagttttatgaatttttgtttatgccttttgggaagagttgtattgacaaattttttatgcttaaagtaaaccataaatcaaaaaaataaaatctaggatgcaataaaacaaaacaacttcttgacataagtatggtatgtaaatctgttttgattggaaatcaatttgttatattgccagaattcctgttttagaatacatctctgctgatctgtctgtattcttagactgcatatctgggatgaactctgggcagaattcacatgggcttcctttgaaataaacaagacttttcaaattcttagtcgatctgcagaacctgtagccaggcactgaaccattttgatagatgcagtaatcgttgcaagtgtatatttcaaggagttctggctgggtcctagtttatgcttgtggcagaagcagtgagtaactgggaggaagttggtgagtaagcttcaaggaagaagtcatttttagtactctggatcttcctgattttaaagcactacaaaatggtgcattttcattcttgtcaagtgataacagatatattctgatgagcctgaaatgaatatatattgtatcatttttataatatctagcaaggtttgtattttcctagaacttgaactaaatttcagttcataaaatttataaaatacttagttgttgtaaaatatttttggaatgttcacataggtgacacacaaatgtcccattttcattctttctatagtaaatatgttctgatatgtgaaggtttagcagatgcatcagcatttaatcctagaggatctggcataatcttttcccccaagaatagaaattttttctgcttatgaaagtagtacatgtttctttaaaaacaaatcaatattgacttctgcctgctgtatagcactatgcctccacctggccatgaccaggggcatgtcctggtccacctacctgaaaatgtttgcaaccagcctcctggccatgtgcacaggggctgaagttgtcccacaggtattacgggccaacctgacaatacatgaagttccaccaaagtctgagaactcagaactgagctttggggactgaaagacagcacaaacctcaaatttctcagcactggaaacctcaaaatataactgaattccataaataagattttaagtcttaaatatgtatttttaaatgtattaaaagtcaagctgcttgtatttaagcacctaatacaatgcttaggttgtaaaaggagatgctcaataggtactaactgatatattgagatttaattatggtttgaccaatatttattggaaaccgccaaagcttaaatcatcagcttcttgaatgtgatttgaaaggtaatttagtattgaatagcatgtgagctagagtatttcattctttctggtttatttcttcaaatagactttgaatataatggtgaatgggtattataaattaactaataaaaatgacattgaaaatgaaaaaatatatatattaaagtgtagaaagtgaccaggcaccggtggatcccctaactacaaggaacccctagtgatggagttggccactccctctctgcgcgctcgctcgctcactgaggccgggcgaccaaaggtcgcccgacgcccgggctttgcccgggcggcctcagtgagcgagcgagcgcgcagagagggagtggccaa

SEQ ID NO: 85 - DNA, 4697 bp, synthetic construct
  source 1..4697: mol_type = other DNA
ttggccactccctctctgcgcgctcgctcgctcactgaggccgggcgaccaaaggtcgcccgacgcccgggctttgcccgggcggcctcagtgagcgagcgagcgcgcagagagggagtggccaactccatcactaggggttcctctcgaggagcttggcccattgcatacgttgtatccatatcataatatgtacatttatattggctcatgtccaacattaccgccatgttactagtgtcgacaggctcagaggcacacaggagtttctgggctcaccctgcccccttccaacccctcagttcccatcctccagcagctgtttgtgtgctgcctctgaagtccacactgaacaaacttcagcctactcatgtccctaaaatgggcaaacattgcaagcagcaaacagcaaacacacagccctccctgcctgctgaccttggagctggggcagaggtcagagacctctctgggcccatgccacctccaacatccactcgaccccttggaatttcggtggagaggagcagaggttgtcctggcgtggtttaggtagtgtgagaggggtcgacgatcttgctaccagtggaacagccactaaggattctgcagtgagagcagagggccagctaagtggtactctcccagagactgtctgactcacgccaccccctccaccttggacacaggacgctgtggtttctgagccaggtacaatgactcctttcggtaagtgcagtggaagctgtacactgcccaggcaaagcgtccgggcagcgtaggcgggcgactcagatcccagccagtggacttagcccctgtttgctcctccgataactggggtgaccttggttaatattcaccagcagcctcccccgttgcccctctggatccactgcttaaatacggacgaggacagggccctgtctcctcagcttcaggcaccaccactgacctgggacagtgaatcgtaagtatgcctttcactgcgagaggttctggagaggcttctgagctccccatggcccaggcaggcagcaggtctggggcaggaggggggttgtggagtgggtatccgcctgctgaggtgcagggcagatcatcatgtgccttgactcggggcctggcccccccatctctgtcttgcaggacaattgccgtcttctgtctcgtggggcatcctcctgctggcaggcctgtgctgcctggtccctgtctccctggctgaggaccgggtaccgccaccatgagcacagcagtgctggagaaccctggcctgggcaggaaattgtctgactttggccaggaaacctcctacattgaggacaactgtaaccagaatggagccatcagcctgatcttcagcctgaaagaggaggtgggggccctggccaaggtgctgagactgtttgaggaaaatgatgtcaacctgacccacattgagtccagacccagcagactgaagaaagatgaatatgagttcttcacacacctggacaagagaagcctgcctgccctgaccaacatcatcaagatcctgagacatgacataggagccacagtgcatgagctgagcagggacaagaagaaggacacagtgccctggttcccaagaaccatccaggaactggatagatttgccaaccagatcctgagctatggagctgagctggatgctgaccacccaggcttcaaggaccctgtgtacagagccagaaggaagcagtttgctgacatagcctacaactacagacacggccagcctatccccagagtggaatacatggaagaggagaagaagacctggggcactgtgttcaagacccttaagtctctgtacaagacccatgcctgctatgaatacaaccacatcttccctctgctggagaagtactgtggcttccatgaagacaatatcccccagctggaggatgtgagccagttcctgcaaacctgcactggcttcagactgagacctgtggcaggcctgctgagcagcagagacttcctgggtggcctggccttcagagtcttccactgtacccagtacatcaggcatggcagcaagcccatgtacactccagagcctgacatctgccacgagctgctgggccatgtgcctctgttctcagacagaagctttgcccagttcagccaggagattggcttagcctccttaggagcccctgatgaatacatagaaaaactggccaccatctactggttcacagtggagtttggcctgtgcaagcaaggtgacagcatcaaagcctatggagctggcctgctgagctcctttggagaacttcagtactgcctctctgagaagcctaaactgctgcctctggagctggagaagacagccatccagaactacacagtgacagaattccaacctctgtactatgttgctgagagcttcaatgatgccaaagagaaggtgagaaactttgctgccaccatccccagacccttctctgtgaggtatgacccttacacccagagaattgaagtgctggacaacacccagcagctgaagatcctggctgacagcatcaactctgagataggcatcctgtgctctgccctgcaaaagatcaagtgaagatctgcctcgactgtgccttctagttgccagccatctgttgtttgcccctcccccgtgccttccttgaccctggaaggtgccactcccactgtcctttcctaataaaatgaggaaattgcatcgcattgtctgagtaggtgtcattctattctggggggtggggtggggcaggacagcaagggggaggattgggaagacaatagcaggcatgctggggatgcggtgggctctatggggcgcgccgtacccattgccaagttctgacaactgtctgtctatagccaattatgcatttcttaaattagaacccccccaatatacccaaatatatatatatgtgtgcatatatatagtaagttgtaacaaagttgtgaattcatacctgaagtatctcaagtgatgcaagttttatgaatttttgtttatgccttttgggaagagttgtattgacaaattttttatgcttaaagtaaaccataaatcaaaaaaataaaatctaggatgcaataaaacaaaacaacttcttgacataagtatggtatgtaaatctgttttgattggaaatcaatttgttatattgccagaattcctgttttagaatacatctctgctgatctgtctgtattcttagactgcatatctgggatgaactctgggcagaattcacatgggcttcctttgaaataaacaagacttttcaaattcttagtcgatctgcagaacctgtagccaggcactgaaccattttgatagatgcagtaatcgttgcaagtgtatatttcaaggagttctggctgggtcctagtttatgcttgtggcagaagcagtgagtaactgggaggaagttggtgagtaagcttcaaggaagaagtcatttttagtactctggatcttcctgattttaaagcactacaaaatggtgcattttcattcttgtcaagtgataacagatatattctgatgagcctgaaatgaatatatattgtatcatttttataatatctagcaaggtttgtattttcctagaacttgaactaaatttcagttcataaaatttataaaatacttagttgttgtaaaatatttttggaatgttcacataggtgacacacaaatgtcccattttcattctttctatagtaaatatgttctgatatgtgaaggtttagcagatgcatcagcatttaatcctagaggatctggcataatcttttcccccaagaatagaaattttttctgcttatgaaagtagtacatgtttctttaaaaacaaatcaatattgacttctgcctgctgtatagcactatgcctccacctggccatgaccaggggcatgtcctggtccacctacctgaaaatgtttgcaaccagcctcctggccatgtgcacaggggctgaagttgtcccacaggtattacgggccaacctgacaatacatgaagttccaccaaagtctgagaactcagaactgagctttggggactgaaagacagcacaaacctcaaatttctcagcactggaaacctcaaaatataactgaattccataaataagattttaagtcttaaatatgtatttttaaatgtattaaaagtcaagctgcttgtatttaagcacctaatacaatgcttaggttgtaaaaggagatgctcaataggtactaactgatatattgagatttaattatggtttgaccaatatttattggaaaccgccaaagcttaaatcatcagcttcttgaatgtgatttgaaaggtaatttagtattgaatagcatgtgagctagagtatttcattctttctggtttatttcttcaaatagactttgaatataatggtgaatgggtattataaattaactaataaaaatgacattgaaaatgaaaaaatatatatattaaagtgtagaaagtgaccaggcaccggtggatcccctaactacaaggaacccctagtgatggagttggccactccctctctgcgcgctcgctcgctcactgaggccgggcgaccaaaggtcgcccgacgcccgggctttgcccgggcggcctcagtgagcgagcgagcgcgcagagagggagtggccaa

SEQ ID NO: 86 - DNA, 4697 bp, synthetic construct
  source 1..4697: mol_type = other DNA
ttggccactccctctctgcgcgctcgctcgctcactgaggccgggcgaccaaaggtcgcccgacgcccgggctttgcccgggcggcctcagtgagcgagcgagcgcgcagagagggagtggccaactccatcactaggggttcctctcgaggagcttggcccattgcatacgttgtatccatatcataatatgtacatttatattggctcatgtccaacattaccgccatgttactagtgtcgacaggctcagaggcacacaggagtttctgggctcaccctgcccccttccaacccctcagttcccatcctccagcagctgtttgtgtgctgcctctgaagtccacactgaacaaacttcagcctactcatgtccctaaaatgggcaaacattgcaagcagcaaacagcaaacacacagccctccctgcctgctgaccttggagctggggcagaggtcagagacctctctgggcccatgccacctccaacatccactcgaccccttggaatttcggtggagaggagcagaggttgtcctggcgtggtttaggtagtgtgagaggggtcgacgatcttgctaccagtggaacagccactaaggattctgcagtgagagcagagggccagctaagtggtactctcccagagactgtctgactcacgccaccccctccaccttggacacaggacgctgtggtttctgagccaggtacaatgactcctttcggtaagtgcagtggaagctgtacactgcccaggcaaagcgtccgggcagcgtaggcgggcgactcagatcccagccagtggacttagcccctgtttgctcctccgataactggggtgaccttggttaatattcaccagcagcctcccccgttgcccctctggatccactgcttaaatacggacgaggacagggccctgtctcctcagcttcaggcaccaccactgacctgggacagtgaatcgtaagtatgcctttcactgcgagaggttctggagaggcttctgagctccccatggcccaggcaggcagcaggtctggggcaggaggggggttgtggagtgggtatccgcctgctgaggtgcagggcagatcatcatgtgccttgactcggggcctggcccccccatctctgtcttgcaggacaattgccgtcttctgtctcgtggggcatcctcctgctggcaggcctgtgctgcctggtccctgtctccctggctgaggaccgggtaccgccaccatgagcacagcagtgcttgagaaccctggcctgggcaggaagctgtctgactttggccaggagactagctacattgaggacaactgcaaccaaaatggagccatcagcctgatcttctccctgaaggaagaggttggagcccttgccaaggtcctgagactgtttgaggagaatgatgtgaacctcacccacatagagagcagacctagcaggctgaaaaaggatgagtatgagttcttcacccacctggacaagaggagcctgccagccttaaccaacatcatcaagatcttgagacatgacattggagccacagtgcatgaactctctagagacaagaagaaggacactgtgccttggttccctagaaccatccaggaactggacagatttgccaaccagatcctgagctatggagctgagctggatgctgaccaccctggcttcaaggaccctgtgtacagagccaggagaaagcagtttgctgacattgcctacaactacagacacggccagcccatccccagagtggagtacatggaggaagagaagaagacctggggcacagtgttcaagaccctgaagagcctgtacaagacccatgcctgttatgaatacaaccacatcttccctctgctggaaaagtactgtggcttccacgaagacaacatcccacagctggaggatgtgtcccagttcctgcagacctgcacaggcttcagactgagacctgtggctggcctgctgagcagcagagacttcctgggaggcctggccttcagggtgttccactgcacccagtacatcagacacggcagcaagcccatgtacaccccagagcctgacatctgccatgagctgctgggccatgtgcctctgttcagtgatagaagctttgcccagttctcccaggaaattggcctggccagcctgggggcccctgatgagtacatagaaaaactggccaccatctactggttcacagttgagtttggcctgtgtaaacagggtgacagcatcaaggcctatggagctggcctgctgagcagctttggagagctgcagtactgcctgtctgagaagcccaagctgctgcctctggagctggaaaagacagctatccaaaactacacagtgacagagttccaacccctgtactatgtggcagaatccttcaatgatgccaaggagaaggtgagaaactttgctgccaccatccctagacccttctctgtgaggtatgacccttacacccagagaatagaagtgctggataacacccagcagctgaaaatcttggctgacagcatcaactctgaaattggcatcctgtgctctgccctgcagaaaatcaaatgaagatctgcctcgactgtgccttctagttgccagccatctgttgtttgcccctcccccgtgccttccttgaccctggaaggtgccactcccactgtcctttcctaataaaatgaggaaattgcatcgcattgtctgagtaggtgtcattctattctggggggtggggtggggcaggacagcaagggggaggattgggaagacaatagcaggcatgctggggatgcggtgggctctatggggcgcgccgtacccattgccaagttctgacaactgtctgtctatagccaattatgcatttcttaaattagaacccccccaatatacccaaatatatatatatgtgtgcatatatatagtaagttgtaacaaagttgtgaattcatacctgaagtatctcaagtgatgcaagttttatgaatttttgtttatgccttttgggaagagttgtattgacaaattttttatgcttaaagtaaaccataaatcaaaaaaataaaatctaggatgcaataaaacaaaacaacttcttgacataagtatggtatgtaaatctgttttgattggaaatcaatttgttatattgccagaattcctgttttagaatacatctctgctgatctgtctgtattcttagactgcatatctgggatgaactctgggcagaattcacatgggcttcctttgaaataaacaagacttttcaaattcttagtcgatctgcagaacctgtagccaggcactgaaccattttgatagatgcagtaatcgttgcaagtgtatatttcaaggagttctggctgggtcctagtttatgcttgtggcagaagcagtgagtaactgggaggaagttggtgagtaagcttcaaggaagaagtcatttttagtactctggatcttcctgattttaaagcactacaaaatggtgcattttcattcttgtcaagtgataacagatatattctgatgagcctgaaatgaatatatattgtatcatttttataatatctagcaaggtttgtattttcctagaacttgaactaaatttcagttcataaaatttataaaatacttagttgttgtaaaatatttttggaatgttcacataggtgacacacaaatgtcccattttcattctttctatagtaaatatgttctgatatgtgaaggtttagcagatgcatcagcatttaatcctagaggatctggcataatcttttcccccaagaatagaaattttttctgcttatgaaagtagtacatgtttctttaaaaacaaatcaatattgacttctgcctgctgtatagcactatgcctccacctggccatgaccaggggcatgtcctggtccacctacctgaaaatgtttgcaaccagcctcctggccatgtgcacaggggctgaagttgtcccacaggtattacgggccaacctgacaatacatgaagttccaccaaagtctgagaactcagaactgagctttggggactgaaagacagcacaaacctcaaatttctcagcactggaaacctcaaaatataactgaattccataaataagattttaagtcttaaatatgtatttttaaatgtattaaaagtcaagctgcttgtatttaagcacctaatacaatgcttaggttgtaaaaggagatgctcaataggtactaactgatatattgagatttaattatggtttgaccaatatttattggaaaccgccaaagcttaaatcatcagcttcttgaatgtgatttgaaaggtaatttagtattgaatagcatgtgagctagagtatttcattctttctggtttatttcttcaaatagactttgaatataatggtgaatgggtattataaattaactaataaaaatgacattgaaaatgaaaaaatatatatattaaagtgtagaaagtgaccaggcaccggtggatcccctaactacaaggaacccctagtgatggagttggccactccctctctgcgcgctcgctcgctcactgaggccgggcgaccaaaggtcgcccgacgcccgggctttgcccgggcggcctcagtgagcgagcgagcgcgcagagagggagtggccaa

SEQ ID NO: 87 - DNA, 4697 bp, synthetic construct
  source 1..4697: mol_type = other DNA
ttggccactccctctctgcgcgctcgctcgctcactgaggccgggcgaccaaaggtcgcccgacgcccgggctttgcccgggcggcctcagtgagcgagcgagcgcgcagagagggagtggccaactccatcactaggggttcctctcgaggagcttggcccattgcatacgttgtatccatatcataatatgtacatttatattggctcatgtccaacattaccgccatgttactagtgtcgacaggctcagaggcacacaggagtttctgggctcaccctgcccccttccaacccctcagttcccatcctccagcagctgtttgtgtgctgcctctgaagtccacactgaacaaacttcagcctactcatgtccctaaaatgggcaaacattgcaagcagcaaacagcaaacacacagccctccctgcctgctgaccttggagctggggcagaggtcagagacctctctgggcccatgccacctccaacatccactcgaccccttggaatttcggtggagaggagcagaggttgtcctggcgtggtttaggtagtgtgagaggggtcgacgatcttgctaccagtggaacagccactaaggattctgcagtgagagcagagggccagctaagtggtactctcccagagactgtctgactcacgccaccccctccaccttggacacaggacgctgtggtttctgagccaggtacaatgactcctttcggtaagtgcagtggaagctgtacactgcccaggcaaagcgtccgggcagcgtaggcgggcgactcagatcccagccagtggacttagcccctgtttgctcctccgataactggggtgaccttggttaatattcaccagcagcctcccccgttgcccctctggatccactgcttaaatacggacgaggacagggccctgtctcctcagcttcaggcaccaccactgacctgggacagtgaatcgtaagtatgcctttcactgcgagaggttctggagaggcttctgagctccccatggcccaggcaggcagcaggtctggggcaggaggggggttgtggagtgggtatccgcctgctgaggtgcagggcagatcatcatgtgccttgactcggggcctggcccccccatctctgtcttgcaggacaattgccgtcttctgtctcgtggggcatcctcctgctggcaggcctgtgctgcctggtccctgtctccctggctgaggaccgggtaccgccaccatgagcacagcagtgttggagaaccctggcctgggcaggaaactgtctgactttggccaggaaaccagctacattgaggataactgtaaccagaatggagccatcagcctgatcttcagcctgaaagaggaggtgggggccctggccaaggtgctgagactgtttgaggaaaatgatgtcaacctgacccacattgagtccagacccagcagactcaagaaagatgaatatgagttcttcacacacctggacaagagaagcctgcctgccctgaccaacatcatcaagatcctgagacatgacataggagccacagtgcatgaactgagcagagacaagaagaaggacacagtgccctggttccctagaaccatccaggaactggacagatttgccaaccagatcctgagttatggagctgagctggatgctgaccacccaggcttcaaggaccctgtgtacagagccagaaggaagcagtttgctgacattgcctacaactacagacacggccagcctatccccagagtggaatacatggaagaggagaagaagacctggggcactgtgttcaagacccttaagtctctgtacaaaacccacgcctgctatgaatacaaccacatcttccctctgctggagaagtactgtggcttccacgaagacaatatcccccagctggaggatgtgagccagttcctgcaaacctgcactggcttcagactgagacctgtggcaggcctgctgagcagcagagacttcctgggtggcctggccttcagagtcttccactgtacccagtacatcaggcatggcagcaagcccatgtacacaccagagcctgacatctgccacgagctgctgggccatgtgcctctgttctcagacagaagctttgcccagttctcccaggagattggcttagcctccttaggagcccctgatgaatacatagagaaactggccaccatctactggttcacagtggagtttggcctgtgcaagcaaggtgacagcatcaaggcctatggagctggcctgctgagcagctttggagaacttcagtactgcctctctgagaagcccaaactgctgcctctggaactggagaagacagccatccagaactacacagtgacagaattccaacctctgtactatgttgctgagagcttcaatgatgccaaagagaaggtgagaaactttgctgccaccatccccagacccttctctgtgaggtatgacccttacacccagagaattgaagtgctggataacacccagcagctgaagatcctagctgacagcatcaactctgagataggcatcctgtgctctgccctgcaaaagatcaagtgaagatctgcctcgactgtgccttctagttgccagccatctgttgtttgcccctcccccgtgccttccttgaccctggaaggtgccactcccactgtcctttcctaataaaatgaggaaattgcatcgcattgtctgagtaggtgtcattctattctggggggtggggtggggcaggacagcaagggggaggattgggaagacaatagcaggcatgctggggatgcggtgggctctatggggcgcgccgtacccattgccaagttctgacaactgtctgtctatagccaattatgcatttcttaaattagaacccccccaatatacccaaatatatatatatgtgtgcatatatatagtaagttgtaacaaagttgtgaattcatacctgaagtatctcaagtgatgcaagttttatgaatttttgtttatgccttttgggaagagttgtattgacaaattttttatgcttaaagtaaaccataaatcaaaaaaataaaatctaggatgcaataaaacaaaacaacttcttgacataagtatggtatgtaaatctgttttgattggaaatcaatttgttatattgccagaattcctgttttagaatacatctctgctgatctgtctgtattcttagactgcatatctgggatgaactctgggcagaattcacatgggcttcctttgaaataaacaagacttttcaaattcttagtcgatctgcagaacctgtagccaggcactgaaccattttgatagatgcagtaatcgttgcaagtgtatatttcaaggagttctggctgggtcctagtttatgcttgtggcagaagcagtgagtaactgggaggaagttggtgagtaagcttcaaggaagaagtcatttttagtactctggatcttcctgattttaaagcactacaaaatggtgcattttcattcttgtcaagtgataacagatatattctgatgagcctgaaatgaatatatattgtatcatttttataatatctagcaaggtttgtattttcctagaacttgaactaaatttcagttcataaaatttataaaatacttagttgttgtaaaatatttttggaatgttcacataggtgacacacaaatgtcccattttcattctttctatagtaaatatgttctgatatgtgaaggtttagcagatgcatcagcatttaatcctagaggatctggcataatcttttcccccaagaatagaaattttttctgcttatgaaagtagtacatgtttctttaaaaacaaatcaatattgacttctgcctgctgtatagcactatgcctccacctggccatgaccaggggcatgtcctggtccacctacctgaaaatgtttgcaaccagcctcctggccatgtgcacaggggctgaagttgtcccacaggtattacgggccaacctgacaatacatgaagttccaccaaagtctgagaactcagaactgagctttggggactgaaagacagcacaaacctcaaatttctcagcactggaaacctcaaaatataactgaattccataaataagattttaagtcttaaatatgtatttttaaatgtattaaaagtcaagctgcttgtatttaagcacctaatacaatgcttaggttgtaaaaggagatgctcaataggtactaactgatatattgagatttaattatggtttgaccaatatttattggaaaccgccaaagcttaaatcatcagcttcttgaatgtgatttgaaaggtaatttagtattgaatagcatgtgagctagagtatttcattctttctggtttatttcttcaaatagactttgaatataatggtgaatgggtattataaattaactaataaaaatgacattgaaaatgaaaaaatatatatattaaagtgtagaaagtgaccaggcaccggtggatcccctaactacaaggaacccctagtgatggagttggccactccctctctgcgcgctcgctcgctcactgaggccgggcgaccaaaggtcgcccgacgcccgggctttgcccgggcggcctcagtgagcgagcgagcgcgcagagagggagtggccaa

SEQ ID NO: 88 - DNA, 4697 bp, synthetic construct
  source 1..4697: mol_type = other DNA
ttggccactccctctctgcgcgctcgctcgctcactgaggccgggcgaccaaaggtcgcccgacgcccgggctttgcccgggcggcctcagtgagcgagcgagcgcgcagagagggagtggccaactccatcactaggggttcctctcgaggagcttggcccattgcatacgttgtatccatatcataatatgtacatttatattggctcatgtccaacattaccgccatgttactagtgtcgacaggctcagaggcacacaggagtttctgggctcaccctgcccccttccaacccctcagttcccatcctccagcagctgtttgtgtgctgcctctgaagtccacactgaacaaacttcagcctactcatgtccctaaaatgggcaaacattgcaagcagcaaacagcaaacacacagccctccctgcctgctgaccttggagctggggcagaggtcagagacctctctgggcccatgccacctccaacatccactcgaccccttggaatttcggtggagaggagcagaggttgtcctggcgtggtttaggtagtgtgagaggggtcgacgatcttgctaccagtggaacagccactaaggattctgcagtgagagcagagggccagctaagtggtactctcccagagactgtctgactcacgccaccccctccaccttggacacaggacgctgtggtttctgagccaggtacaatgactcctttcggtaagtgcagtggaagctgtacactgcccaggcaaagcgtccgggcagcgtaggcgggcgactcagatcccagccagtggacttagcccctgtttgctcctccgataactggggtgaccttggttaatattcaccagcagcctcccccgttgcccctctggatccactgcttaaatacggacgaggacagggccctgtctcctcagcttcaggcaccaccactgacctgggacagtgaatcgtaagtatgcctttcactgcgagaggttctggagaggcttctgagctccccatggcccaggcaggcagcaggtctggggcaggaggggggttgtggagtgggtatccgcctgctgaggtgcagggcagatcatcatgtgccttgactcggggcctggcccccccatctctgtcttgcaggacaattgccgtcttctgtctcgtggggcatcctcctgctggcaggcctgtgctgcctggtccctgtctccctggctgaggaccgggtaccgccaccatgagcacagctgtgctggagaaccctggcctgggcagaaagctgtctgactttggccaggagacctcttacattgaagacaactgcaaccagaatggggccatcagcctgatcttcagtctgaaggaagaagtgggagccctggccaaggtactgagactgtttgaggaaaatgatgtcaaccttacccacattgagagcagacccagcagactgaagaaggatgagtatgagttcttcacccacctggacaaaagatccctgcctgccctgaccaacatcatcaagatcctgagacacgacattggagccacagtgcatgagctcagcagggacaagaagaaggacacagtgccctggttccctagaaccatccaggagctggacagatttgccaaccagatcctgagctatggagcagaactggatgctgaccacccaggcttcaaagaccctgtgtacagggccagaaggaagcagtttgctgacatagcctacaattacagacatggccagcccatccctagagtggagtacatggaggaggaaaagaagacctggggcactgtcttcaaaaccctgaagtccctgtacaaaacccacgcctgctatgagtacaaccacatcttccctctgctggaaaagtactgtggcttccacgaagataacatccctcagttagaggatgtgagccagttcctgcagacatgcacaggcttcagactgagaccagtggcaggcctgctgtcttccagagatttcctggggggcctggccttcagggtgttccactgcacccagtacatcaggcacggcagcaagcctatgtacacccctgagcctgacatctgccatgagctgctgggccacgtgcctctgttctctgacagaagctttgcccagttcagccaggagattggccttgccagcttaggagcccctgatgaatacatagagaagctggccaccatctactggttcacagtggaatttggcctgtgtaagcagggagacagcatcaaggcctatggagctggcctgcttagcagctttggagagctgcagtactgcctgtcagagaagcccaaactgctgccactggaactggaaaagacagccatccaaaactacacagtgacagagttccagcccctgtactatgttgctgagtctttcaatgatgccaaggagaaggtgagaaactttgctgccaccatccccagacccttctcagtgagatatgacccttacacccaaagaatagaggtgctggacaacacccagcagctgaagatcctggcagacagcatcaactctgaaattggcatcctgtgttctgccctgcaaaaaatcaagtgaagatctgcctcgactgtgccttctagttgccagccatctgttgtttgcccctcccccgtgccttccttgaccctggaaggtgccactcccactgtcctttcctaataaaatgaggaaattgcatcgcattgtctgagtaggtgtcattctattctggggggtggggtggggcaggacagcaagggggaggattgggaagacaatagcaggcatgctggggatgcggtgggctctatggggcgcgccgtacccattgccaagttctgacaactgtctgtctatagccaattatgcatttcttaaattagaacccccccaatatacccaaatatatatatatgtgtgcatatatatagtaagttgtaacaaagttgtgaattcatacctgaagtatctcaagtgatgcaagttttatgaatttttgtttatgccttttgggaagagttgtattgacaaattttttatgcttaaagtaaaccataaatcaaaaaaataaaatctaggatgcaataaaacaaaacaacttcttgacataagtatggtatgtaaatctgttttgattggaaatcaatttgttatattgccagaattcctgttttagaatacatctctgctgatctgtctgtattcttagactgcatatctgggatgaactctgggcagaattcacatgggcttcctttgaaataaacaagacttttcaaattcttagtcgatctgcagaacctgtagccaggcactgaaccattttgatagatgcagtaatcgttgcaagtgtatatttcaaggagttctggctgggtcctagtttatgcttgtggcagaagcagtgagtaactgggaggaagttggtgagtaagcttcaaggaagaagtcatttttagtactctggatcttcctgattttaaagcactacaaaatggtgcattttcattcttgtcaagtgataacagatatattctgatgagcctgaaatgaatatatattgtatcatttttataatatctagcaaggtttgtattttcctagaacttgaactaaatttcagttcataaaatttataaaatacttagttgttgtaaaatatttttggaatgttcacataggtgacacacaaatgtcccattttcattctttctatagtaaatatgttctgatatgtgaaggtttagcagatgcatcagcatttaatcctagaggatctggcataatcttttcccccaagaatagaaattttttctgcttatgaaagtagtacatgtttctttaaaaacaaatcaatattgacttctgcctgctgtatagcactatgcctccacctggccatgaccaggggcatgtcctggtccacctacctgaaaatgtttgcaaccagcctcctggccatgtgcacaggggctgaagttgtcccacaggtattacgggccaacctgacaatacatgaagttccaccaaagtctgagaactcagaactgagctttggggactgaaagacagcacaaacctcaaatttctcagcactggaaacctcaaaatataactgaattccataaataagattttaagtcttaaatatgtatttttaaatgtattaaaagtcaagctgcttgtatttaagcacctaatacaatgcttaggttgtaaaaggagatgctcaataggtactaactgatatattgagatttaattatggtttgaccaatatttattggaaaccgccaaagcttaaatcatcagcttcttgaatgtgatttgaaaggtaatttagtattgaatagcatgtgagctagagtatttcattctttctggtttatttcttcaaatagactttgaatataatggtgaatgggtattataaattaactaataaaaatgacattgaaaatgaaaaaatatatatattaaagtgtagaaagtgaccaggcaccggtggatcccctaactacaaggaacccctagtgatggagttggccactccctctctgcgcgctcgctcgctcactgaggccgggcgaccaaaggtcgcccgacgcccgggctttgcccgggcggcctcagtgagcgagcgagcgcgcagagagggagtggccaa

SEQ ID NO: 89 - DNA, 4697 bp, synthetic construct
  source 1..4697: mol_type = other DNA
ttggccactccctctctgcgcgctcgctcgctcactgaggccgggcgaccaaaggtcgcccgacgcccgggctttgcccgggcggcctcagtgagcgagcgagcgcgcagagagggagtggccaactccatcactaggggttcctctcgaggagcttggcccattgcatacgttgtatccatatcataatatgtacatttatattggctcatgtccaacattaccgccatgttactagtgtcgacaggctcagaggcacacaggagtttctgggctcaccctgcccccttccaacccctcagttcccatcctccagcagctgtttgtgtgctgcctctgaagtccacactgaacaaacttcagcctactcatgtccctaaaatgggcaaacattgcaagcagcaaacagcaaacacacagccctccctgcctgctgaccttggagctggggcagaggtcagagacctctctgggcccatgccacctccaacatccactcgaccccttggaatttcggtggagaggagcagaggttgtcctggcgtggtttaggtagtgtgagaggggtcgacgatcttgctaccagtggaacagccactaaggattctgcagtgagagcagagggccagctaagtggtactctcccagagactgtctgactcacgccaccccctccaccttggacacaggacgctgtggtttctgagccaggtacaatgactcctttcggtaagtgcagtggaagctgtacactgcccaggcaaagcgtccgggcagcgtaggcgggcgactcagatcccagccagtggacttagcccctgtttgctcctccgataactggggtgaccttggttaatattcaccagcagcctcccccgttgcccctctggatccactgcttaaatacggacgaggacagggccctgtctcctcagcttcaggcaccaccactgacctgggacagtgaatcgtaagtatgcctttcactgcgagaggttctggagaggcttctgagctccccatggcccaggcaggcagcaggtctggggcaggaggggggttgtggagtgggtatccgcctgctgaggtgcagggcagatcatcatgtgccttgactcggggcctggcccccccatctctgtcttgcaggacaattgccgtcttctgtctcgtggggcatcctcctgctggcaggcctgtgctgcctggtccctgtctccctggctgaggaccgggtaccgccaccatgagcacagctgtgttggagaacccaggcctgggcaggaagctgtctgactttggccaggaaaccagctacattgaagataactgcaaccagaatggggccatcagcctgatcttcagcctgaaggaagaggtgggagccctggccaaagtgctgagactgtttgaagagaatgatgtgaacctgacccacatagaaagcaggcctagcagactgaaaaaggatgagtatgagttcttcacccacctggacaaaagaagcctgcctgccctgaccaacatcatcaagatcctgagacatgacataggagccacagtgcatgagctgagcagagacaagaagaaggacacagtgccttggttccccaggaccatccaggagctggacagatttgccaaccagatcctgagctatggtgctgaacttgatgctgaccaccctggcttcaaggaccctgtgtacagggccagaagaaaacagtttgctgacatagcctacaactacagacacggccaacccatccccagagtggagtacatggaagaagagaaaaagacctggggcacagtgttcaagacactgaaaagcctgtacaagacccatgcctgctatgaatacaaccacatcttccctctactggaaaagtactgtggcttccacgaagataacatcccccagctggaagatgtgtcccagttcctgcagacctgcacaggcttcagactgcggccagttgctggcctgctgagcagcagagacttcctggggggcttggccttcagagtgttccactgcacccagtacatcagacacggcagcaagcccatgtacacccctgaaccagacatctgtcacgaactgctgggccatgtgcctctgttctctgacagaagctttgcccagttctcccaggagattggccttgccagccttggagcccctgatgaatacattgagaagctagccaccatctactggttcacagtggaatttggcctgtgtaagcagggagatagcatcaaggcctatggagctggcctgctgagcagctttggagagctgcaatactgcctgtctgagaagcctaaactgctccccctggaactggagaagacagccatccagaactacacagtgactgaattccagcccctgtactatgtggctgaatccttcaatgatgccaaggaaaaggtgagaaactttgctgccaccatcccaagaccattctctgtgaggtatgacccctacacccagagaattgaggtcctggacaacacccagcaattaaagatcctggcagactcaatcaactctgagattggcatcctgtgctctgccctgcagaaaatcaaatgaagatctgcctcgactgtgccttctagttgccagccatctgttgtttgcccctcccccgtgccttccttgaccctggaaggtgccactcccactgtcctttcctaataaaatgaggaaattgcatcgcattgtctgagtaggtgtcattctattctggggggtggggtggggcaggacagcaagggggaggattgggaagacaatagcaggcatgctggggatgcggtgggctctatggggcgcgccgtacccattgccaagttctgacaactgtctgtctatagccaattatgcatttcttaaattagaacccccccaatatacccaaatatatatatatgtgtgcatatatatagtaagttgtaacaaagttgtgaattcatacctgaagtatctcaagtgatgcaagttttatgaatttttgtttatgccttttgggaagagttgtattgacaaattttttatgcttaaagtaaaccataaatcaaaaaaataaaatctaggatgcaataaaacaaaacaacttcttgacataagtatggtatgtaaatctgttttgattggaaatcaatttgttatattgccagaattcctgttttagaatacatctctgctgatctgtctgtattcttagactgcatatctgggatgaactctgggcagaattcacatgggcttcctttgaaataaacaagacttttcaaattcttagtcgatctgcagaacctgtagccaggcactgaaccattttgatagatgcagtaatcgttgcaagtgtatatttcaaggagttctggctgggtcctagtttatgcttgtggcagaagcagtgagtaactgggaggaagttggtgagtaagcttcaaggaagaagtcatttttagtactctggatcttcctgattttaaagcactacaaaatggtgcattttcattcttgtcaagtgataacagatatattctgatgagcctgaaatgaatatatattgtatcatttttataatatctagcaaggtttgtattttcctagaacttgaactaaatttcagttcataaaatttataaaatacttagttgttgtaaaatatttttggaatgttcacataggtgacacacaaatgtcccattttcattctttctatagtaaatatgttctgatatgtgaaggtttagcagatgcatcagcatttaatcctagaggatctggcataatcttttcccccaagaatagaaattttttctgcttatgaaagtagtacatgtttctttaaaaacaaatcaatattgacttctgcctgctgtatagcactatgcctccacctggccatgaccaggggcatgtcctggtccacctacctgaaaatgtttgcaaccagcctcctggccatgtgcacaggggctgaagttgtcccacaggtattacgggccaacctgacaatacatgaagttccaccaaagtctgagaactcagaactgagctttggggactgaaagacagcacaaacctcaaatttctcagcactggaaacctcaaaatataactgaattccataaataagattttaagtcttaaatatgtatttttaaatgtattaaaagtcaagctgcttgtatttaagcacctaatacaatgcttaggttgtaaaaggagatgctcaataggtactaactgatatattgagatttaattatggtttgaccaatatttattggaaaccgccaaagcttaaatcatcagcttcttgaatgtgatttgaaaggtaatttagtattgaatagcatgtgagctagagtatttcattctttctggtttatttcttcaaatagactttgaatataatggtgaatgggtattataaattaactaataaaaatgacattgaaaatgaaaaaatatatatattaaagtgtagaaagtgaccaggcaccggtggatcccctaactacaaggaacccctagtgatggagttggccactccctctctgcgcgctcgctcgctcactgaggccgggcgaccaaaggtcgcccgacgcccgggctttgcccgggcggcctcagtgagcgagcgagcgcgcagagagggagtggccaa

SEQ ID NO: 90 - DNA, 4697 bp, synthetic construct
  source 1..4697: mol_type = other DNA
ttggccactccctctctgcgcgctcgctcgctcactgaggccgggcgaccaaaggtcgcccgacgcccgggctttgcccgggcggcctcagtgagcgagcgagcgcgcagagagggagtggccaactccatcactaggggttcctctcgaggagcttggcccattgcatacgttgtatccatatcataatatgtacatttatattggctcatgtccaacattaccgccatgttactagtgtcgacaggctcagaggcacacaggagtttctgggctcaccctgcccccttccaacccctcagttcccatcctccagcagctgtttgtgtgctgcctctgaagtccacactgaacaaacttcagcctactcatgtccctaaaatgggcaaacattgcaagcagcaaacagcaaacacacagccctccctgcctgctgaccttggagctggggcagaggtcagagacctctctgggcccatgccacctccaacatccactcgaccccttggaatttcggtggagaggagcagaggttgtcctggcgtggtttaggtagtgtgagaggggtcgacgatcttgctaccagtggaacagccactaaggattctgcagtgagagcagagggccagctaagtggtactctcccagagactgtctgactcacgccaccccctccaccttggacacaggacgctgtggtttctgagccaggtacaatgactcctttcggtaagtgcagtggaagctgtacactgcccaggcaaagcgtccgggcagcgtaggcgggcgactcagatcccagccagtggacttagcccctgtttgctcctccgataactggggtgaccttggttaatattcaccagcagcctcccccgttgcccctctggatccactgcttaaatacggacgaggacagggccctgtctcctcagcttcaggcaccaccactgacctgggacagtgaatcgtaagtatgcctttcactgcgagaggttctggagaggcttctgagctccccatggcccaggcaggcagcaggtctggggcaggaggggggttgtggagtgggtatccgcctgctgaggtgcagggcagatcatcatgtgccttgactcggggcctggcccccccatctctgtcttgcaggacaattgccgtcttctgtctcgtggggcatcctcctgctggcaggcctgtgctgcctggtccctgtctccctggctgaggaccgggtaccgccaccatgtccacagctgtgctggaaaaccctggcctgggcagaaagctgagtgactttggccaagagacctcttacattgaggacaactgcaaccagaatggagccatctccctgatcttcagcctgaaggaggaagtgggagccctggccaaagtcctgaggctgtttgaagagaatgatgtgaacctgacccacattgagtccaggcccagcagactgaagaaggatgaatatgagttcttcacccacctggacaagagaagcctgccagccctgaccaacatcatcaagatcctgagacatgacattggagccacagtgcatgagctgagcagagacaagaaaaaggacacagtgccctggttcccaagaaccatccaggagctggacagatttgccaaccaaatcctgagctatggtgcagaactggatgctgaccaccctggcttcaaggacccagtgtacagagccagaagaaagcaatttgctgacatagcctacaattacaggcacggccagcctatccctagagtggaatacatggaggaggaaaagaagacctggggcacagtgttcaaaaccctgaagagcctgtacaaaacccacgcctgctatgagtacaaccacatcttccctctgctggagaagtactgtggcttccatgaggacaacatccctcagctggaagatgtgagccagttcctgcagacatgcacaggcttcagactgagacctgttgctggcctgctgagcagcagagacttcctggggggcctggccttcagagtcttccactgtacccagtacatcagacacggcagcaaacccatgtacacccctgagcctgacatctgccacgagctgctgggccatgtgcccctgttctctgacagaagctttgcccagttcagccaagaaataggcctggccagcctgggagcccctgatgagtacattgaaaagctggccaccatctactggttcacagtggagtttggcctgtgcaagcagggggacagcatcaaggcctatggagctggcctgctgagcagctttggagaactgcagtactgcctgtctgagaagcctaagctgctgcctctggaactggagaagactgccatccagaattacactgtgacagaattccagcccctgtactatgttgcagagagcttcaatgatgccaaggaaaaggtgaggaactttgctgccaccatccctaggcccttctctgtgagatatgacccttacacccagagaattgaggtgctggacaacacccagcagcttaagatcctggctgatagcatcaactctgagattggcatcctgtgctctgccctgcagaagatcaaatgaagatctgcctcgactgtgccttctagttgccagccatctgttgtttgcccctcccccgtgccttccttgaccctggaaggtgccactcccactgtcctttcctaataaaatgaggaaattgcatcgcattgtctgagtaggtgtcattctattctggggggtggggtggggcaggacagcaagggggaggattgggaagacaatagcaggcatgctggggatgcggtgggctctatggggcgcgccgtacccattgccaagttctgacaactgtctgtctatagccaattatgcatttcttaaattagaacccccccaatatacccaaatatatatatatgtgtgcatatatatagtaagttgtaacaaagttgtgaattcatacctgaagtatctcaagtgatgcaagttttatgaatttttgtttatgccttttgggaagagttgtattgacaaattttttatgcttaaagtaaaccataaatcaaaaaaataaaatctaggatgcaataaaacaaaacaacttcttgacataagtatggtatgtaaatctgttttgattggaaatcaatttgttatattgccagaattcctgttttagaatacatctctgctgatctgtctgtattcttagactgcatatctgggatgaactctgggcagaattcacatgggcttcctttgaaataaacaagacttttcaaattcttagtcgatctgcagaacctgtagccaggcactgaaccattttgatagatgcagtaatcgttgcaagtgtatatttcaaggagttctggctgggtcctagtttatgcttgtggcagaagcagtgagtaactgggaggaagttggtgagtaagcttcaaggaagaagtcatttttagtactctggatcttcctgattttaaagcactacaaaatggtgcattttcattcttgtcaagtgataacagatatattctgatgagcctgaaatgaatatatattgtatcatttttataatatctagcaaggtttgtattttcctagaacttgaactaaatttcagttcataaaatttataaaatacttagttgttgtaaaatatttttggaatgttcacataggtgacacacaaatgtcccattttcattctttctatagtaaatatgttctgatatgtgaaggtttagcagatgcatcagcatttaatcctagaggatctggcataatcttttcccccaagaatagaaattttttctgcttatgaaagtagtacatgtttctttaaaaacaaatcaatattgacttctgcctgctgtatagcactatgcctccacctggccatgaccaggggcatgtcctggtccacctacctgaaaatgtttgcaaccagcctcctggccatgtgcacaggggctgaagttgtcccacaggtattacgggccaacctgacaatacatgaagttccaccaaagtctgagaactcagaactgagctttggggactgaaagacagcacaaacctcaaatttctcagcactggaaacctcaaaatataactgaattccataaataagattttaagtcttaaatatgtatttttaaatgtattaaaagtcaagctgcttgtatttaagcacctaatacaatgcttaggttgtaaaaggagatgctcaataggtactaactgatatattgagatttaattatggtttgaccaatatttattggaaaccgccaaagcttaaatcatcagcttcttgaatgtgatttgaaaggtaatttagtattgaatagcatgtgagctagagtatttcattctttctggtttatttcttcaaatagactttgaatataatggtgaatgggtattataaattaactaataaaaatgacattgaaaatgaaaaaatatatatattaaagtgtagaaagtgaccaggcaccggtggatcccctaactacaaggaacccctagtgatggagttggccactccctctctgcgcgctcgctcgctcactgaggccgggcgaccaaaggtcgcccgacgcccgggctttgcccgggcggcctcagtgagcgagcgagcgcgcagagagggagtggccaa

SEQ ID NO: 91 - DNA, 4697 bp, synthetic construct
  source 1..4697: mol_type = other DNA
ttggccactccctctctgcgcgctcgctcgctcactgaggccgggcgaccaaaggtcgcccgacgcccgggctttgcccgggcggcctcagtgagcgagcgagcgcgcagagagggagtggccaactccatcactaggggttcctctcgaggagcttggcccattgcatacgttgtatccatatcataatatgtacatttatattggctcatgtccaacattaccgccatgttactagtgtcgacaggctcagaggcacacaggagtttctgggctcaccctgcccccttccaacccctcagttcccatcctccagcagctgtttgtgtgctgcctctgaagtccacactgaacaaacttcagcctactcatgtccctaaaatgggcaaacattgcaagcagcaaacagcaaacacacagccctccctgcctgctgaccttggagctggggcagaggtcagagacctctctgggcccatgccacctccaacatccactcgaccccttggaatttcggtggagaggagcagaggttgtcctggcgtggtttaggtagtgtgagaggggtcgacgatcttgctaccagtggaacagccactaaggattctgcagtgagagcagagggccagctaagtggtactctcccagagactgtctgactcacgccaccccctccaccttggacacaggacgctgtggtttctgagccaggtacaatgactcctttcggtaagtgcagtggaagctgtacactgcccaggcaaagcgtccgggcagcgtaggcgggcgactcagatcccagccagtggacttagcccctgtttgctcctccgataactggggtgaccttggttaatattcaccagcagcctcccccgttgcccctctggatccactgcttaaatacggacgaggacagggccctgtctcctcagcttcaggcaccaccactgacctgggacagtgaatcgtaagtatgcctttcactgcgagaggttctggagaggcttctgagctccccatggcccaggcaggcagcaggtctggggcaggaggggggttgtggagtgggtatccgcctgctgaggtgcagggcagatcatcatgtgccttgactcggggcctggcccccccatctctgtcttgcaggacaattgccgtcttctgtctcgtggggcatcctcctgctggcaggcctgtgctgcctggtccctgtctccctggctgaggaccgggtaccgccaccatgtccacagctgtgctggagaaccctggcctgggcagaaagctgagtgactttggccaggagaccagctacattgaggacaactgtaaccagaatggggccatcagcctgatcttcagcctgaaggaggaagtgggagcattggccaaggtgctgagactgtttgaagaaaatgatgtcaacctgacccacatagagagcagacctagcaggttaaagaaggatgagtatgaattcttcacccacctggacaaaagaagcctgccagccctgaccaacatcatcaagatcttgagacatgacattggtgccacagtgcatgagctgagcagagacaagaagaaggacacagtcccctggttccctagaaccatccaggagctggacagatttgccaaccagatcctcagctatggagctgagctggatgctgatcaccctggcttcaaggacccagtgtacagagccagaagaaagcagtttgctgacatagcctacaactacagacacggccagcccatccctagagttgagtacatggaggaggaaaaaaagacctggggcactgtgttcaagaccctcaagagcctgtacaagacccatgcctgttatgaatacaaccacatcttccccctgctggagaaatactgtggcttccatgaagacaacatccctcagctggaagatgtcagccagttcctgcagacctgcacaggcttcagactgagacctgtggctggcctgctgagctctagagacttcctgggaggcctggccttcagagtgttccactgcacccaatacatcagacatggcagcaagcccatgtacaccccagaacctgacatctgccacgagctgctgggccatgtgcccctgttctctgacaggagctttgcccaattctctcaggagataggcctggcctccctgggtgcccctgatgagtacattgaaaagctagccaccatctactggttcacagtggaatttggcctgtgcaaacagggagacagcatcaaggcctatggagctggcctgctgagctcatttggagaactgcagtactgcctgtctgagaagcctaagctgctgcccctggaactggagaaaacagccatccagaactacacagtgactgagttccagcccctgtactatgtggctgaaagcttcaatgatgccaaggagaaggtgagaaactttgctgccaccatccccaggcctttctctgtgagatatgacccttacacacaaagaattgaggtgctggacaatacccagcagctgaaaatcctggctgacagcatcaactctgagattggcatcctgtgctctgccctgcagaagatcaaatgaagatctgcctcgactgtgccttctagttgccagccatctgttgtttgcccctcccccgtgccttccttgaccctggaaggtgccactcccactgtcctttcctaataaaatgaggaaattgcatcgcattgtctgagtaggtgtcattctattctggggggtggggtggggcaggacagcaagggggaggattgggaagacaatagcaggcatgctggggatgcggtgggctctatggggcgcgccgtacccattgccaagttctgacaactgtctgtctatagccaattatgcatttcttaaattagaacccccccaatatacccaaatatatatatatgtgtgcatatatatagtaagttgtaacaaagttgtgaattcatacctgaagtatctcaagtgatgcaagttttatgaatttttgtttatgccttttgggaagagttgtattgacaaattttttatgcttaaagtaaaccataaatcaaaaaaataaaatctaggatgcaataaaacaaaacaacttcttgacataagtatggtatgtaaatctgttttgattggaaatcaatttgttatattgccagaattcctgttttagaatacatctctgctgatctgtctgtattcttagactgcatatctgggatgaactctgggcagaattcacatgggcttcctttgaaataaacaagacttttcaaattcttagtcgatctgcagaacctgtagccaggcactgaaccattttgatagatgcagtaatcgttgcaagtgtatatttcaaggagttctggctgggtcctagtttatgcttgtggcagaagcagtgagtaactgggaggaagttggtgagtaagcttcaaggaagaagtcatttttagtactctggatcttcctgattttaaagcactacaaaatggtgcattttcattcttgtcaagtgataacagatatattctgatgagcctgaaatgaatatatattgtatcatttttataatatctagcaaggtttgtattttcctagaacttgaactaaatttcagttcataaaatttataaaatacttagttgttgtaaaatatttttggaatgttcacataggtgacacacaaatgtcccattttcattctttctatagtaaatatgttctgatatgtgaaggtttagcagatgcatcagcatttaatcctagaggatctggcataatcttttcccccaagaatagaaattttttctgcttatgaaagtagtacatgtttctttaaaaacaaatcaatattgacttctgcctgctgtatagcactatgcctccacctggccatgaccaggggcatgtcctggtccacctacctgaaaatgtttgcaaccagcctcctggccatgtgcacaggggctgaagttgtcccacaggtattacgggccaacctgacaatacatgaagttccaccaaagtctgagaactcagaactgagctttggggactgaaagacagcacaaacctcaaatttctcagcactggaaacctcaaaatataactgaattccataaataagattttaagtcttaaatatgtatttttaaatgtattaaaagtcaagctgcttgtatttaagcacctaatacaatgcttaggttgtaaaaggagatgctcaataggtactaactgatatattgagatttaattatggtttgaccaatatttattggaaaccgccaaagcttaaatcatcagcttcttgaatgtgatttgaaaggtaatttagtattgaatagcatgtgagctagagtatttcattctttctggtttatttcttcaaatagactttgaatataatggtgaatgggtattataaattaactaataaaaatgacattgaaaatgaaaaaatatatatattaaagtgtagaaagtgaccaggcaccggtggatcccctaactacaaggaacccctagtgatggagttggccactccctctctgcgcgctcgctcgctcactgaggccgggcgaccaaaggtcgcccgacgcccgggctttgcccgggcggcctcagtgagcgagcgagcgcgcagagagggagtggccaa

SEQ ID NO: 92 - DNA, 4697 bp, synthetic construct
  source 1..4697: mol_type = other DNA
ttggccactccctctctgcgcgctcgctcgctcactgaggccgggcgaccaaaggtcgcccgacgcccgggctttgcccgggcggcctcagtgagcgagcgagcgcgcagagagggagtggccaactccatcactaggggttcctctcgaggagcttggcccattgcatacgttgtatccatatcataatatgtacatttatattggctcatgtccaacattaccgccatgttactagtgtcgacaggctcagaggcacacaggagtttctgggctcaccctgcccccttccaacccctcagttcccatcctccagcagctgtttgtgtgctgcctctgaagtccacactgaacaaacttcagcctactcatgtccctaaaatgggcaaacattgcaagcagcaaacagcaaacacacagccctccctgcctgctgaccttggagctggggcagaggtcagagacctctctgggcccatgccacctccaacatccactcgaccccttggaatttcggtggagaggagcagaggttgtcctggcgtggtttaggtagtgtgagaggggtcgacgatcttgctaccagtggaacagccactaaggattctgcagtgagagcagagggccagctaagtggtactctcccagagactgtctgactcacgccaccccctccaccttggacacaggacgctgtggtttctgagccaggtacaatgactcctttcggtaagtgcagtggaagctgtacactgcccaggcaaagcgtccgggcagcgtaggcgggcgactcagatcccagccagtggacttagcccctgtttgctcctccgataactggggtgaccttggttaatattcaccagcagcctcccccgttgcccctctggatccactgcttaaatacggacgaggacagggccctgtctcctcagcttcaggcaccaccactgacctgggacagtgaatcgtaagtatgcctttcactgcgagaggttctggagaggcttctgagctccccatggcccaggcaggcagcaggtctggggcaggaggggggttgtggagtgggtatccgcctgctgaggtgcagggcagatcatcatgtgccttgactcggggcctggcccccccatctctgtcttgcaggacaattgccgtcttctgtctcgtggggcatcctcctgctggcaggcctgtgctgcctggtccctgtctccctggctgaggaccgggtaccgccaccatgtccacagctgtgctggagaaccctggcctgggcagaaagctgagtgactttggccaggagaccagctacatagaagacaactgcaatcagaatggagccatcagcctcatcttcagcctgaaggaggaagtgggagccctggccaaagtgctgagactgtttgaggaaaatgatgtcaacctgacccacattgagagcagacccagcagactgaaaaaggatgagtatgagttcttcacccacctggacaagagaagcctgcctgccctcaccaacatcatcaaaatcctgagacatgacattggagccacagtgcatgaactgtccagagataaaaagaaagacacagtcccctggttccctaggaccatccaggagctggacagatttgccaaccagatcctgtcttatggagcagaactggatgctgaccaccctggcttcaaggaccctgtgtacagggccagaagaaagcagtttgctgacatagcctacaactacagacatggccaacccatccccagagttgaatacatggaggaggaaaagaagacctggggcacagtcttcaagaccctgaaaagcctgtacaagacccacgcctgctatgagtacaaccacatcttccccctgctggaaaagtactgtggcttccacgaggacaacatccctcagctggaggatgtgagccagttcctgcagacctgcacaggcttcagactcagacctgttgctggcctgctgagtagcagagacttcctgggaggcttggccttcagagtgttccactgcacccagtacatcagacacggcagcaagcccatgtacaccccagagcctgacatctgtcatgaactgttaggccatgtgcctctgttctctgaccggagctttgcccaattcagccaggaaattggcctggccagcctgggagccccagatgaatacattgagaagctggccacaatctactggttcacagtggaatttggcctgtgtaagcagggtgacagcatcaaagcctatggtgctggcctgctgagcagctttggagagctgcagtactgcctgtctgaaaagcctaaactgctgcctttggagctggagaagacagccatccagaactacacagtgactgagttccagcccctgtactatgtggctgagagcttcaatgatgccaaggagaaggtgaggaactttgctgccaccatccctagacctttctctgtgagatatgacccctacacccagaggattgaggtgctggacaacacacagcagctgaagatccttgctgacagcatcaactctgagattggcatcctgtgctctgccctgcaaaagatcaagtgaagatctgcctcgactgtgccttctagttgccagccatctgttgtttgcccctcccccgtgccttccttgaccctggaaggtgccactcccactgtcctttcctaataaaatgaggaaattgcatcgcattgtctgagtaggtgtcattctattctggggggtggggtggggcaggacagcaagggggaggattgggaagacaatagcaggcatgctggggatgcggtgggctctatggggcgcgccgtacccattgccaagttctgacaactgtctgtctatagccaattatgcatttcttaaattagaacccccccaatatacccaaatatatatatatgtgtgcatatatatagtaagttgtaacaaagttgtgaattcatacctgaagtatctcaagtgatgcaagttttatgaatttttgtttatgccttttgggaagagttgtattgacaaattttttatgcttaaagtaaaccataaatcaaaaaaataaaatctaggatgcaataaaacaaaacaacttcttgacataagtatggtatgtaaatctgttttgattggaaatcaatttgttatattgccagaattcctgttttagaatacatctctgctgatctgtctgtattcttagactgcatatctgggatgaactctgggcagaattcacatgggcttcctttgaaataaacaagacttttcaaattcttagtcgatctgcagaacctgtagccaggcactgaaccattttgatagatgcagtaatcgttgcaagtgtatatttcaaggagttctggctgggtcctagtttatgcttgtggcagaagcagtgagtaactgggaggaagttggtgagtaagcttcaaggaagaagtcatttttagtactctggatcttcctgattttaaagcactacaaaatggtgcattttcattcttgtcaagtgataacagatatattctgatgagcctgaaatgaatatatattgtatcatttttataatatctagcaaggtttgtattttcctagaacttgaactaaatttcagttcataaaatttataaaatacttagttgttgtaaaatatttttggaatgttcacataggtgacacacaaatgtcccattttcattctttctatagtaaatatgttctgatatgtgaaggtttagcagatgcatcagcatttaatcctagaggatctggcataatcttttcccccaagaatagaaattttttctgcttatgaaagtagtacatgtttctttaaaaacaaatcaatattgacttctgcctgctgtatagcactatgcctccacctggccatgaccaggggcatgtcctggtccacctacctgaaaatgtttgcaaccagcctcctggccatgtgcacaggggctgaagttgtcccacaggtattacgggccaacctgacaatacatgaagttccaccaaagtctgagaactcagaactgagctttggggactgaaagacagcacaaacctcaaatttctcagcactggaaacctcaaaatataactgaattccataaataagattttaagtcttaaatatgtatttttaaatgtattaaaagtcaagctgcttgtatttaagcacctaatacaatgcttaggttgtaaaaggagatgctcaataggtactaactgatatattgagatttaattatggtttgaccaatatttattggaaaccgccaaagcttaaatcatcagcttcttgaatgtgatttgaaaggtaatttagtattgaatagcatgtgagctagagtatttcattctttctggtttatttcttcaaatagactttgaatataatggtgaatgggtattataaattaactaataaaaatgacattgaaaatgaaaaaatatatatattaaagtgtagaaagtgaccaggcaccggtggatcccctaactacaaggaacccctagtgatggagttggccactccctctctgcgcgctcgctcgctcactgaggccgggcgaccaaaggtcgcccgacgcccgggctttgcccgggcggcctcagtgagcgagcgagcgcgcagagagggagtggccaa

SEQ ID NO: 93 - DNA, 4697 bp, synthetic construct
  source 1..4697: mol_type = other DNA
ttggccactccctctctgcgcgctcgctcgctcactgaggccgggcgaccaaaggtcgcccgacgcccgggctttgcccgggcggcctcagtgagcgagcgagcgcgcagagagggagtggccaactccatcactaggggttcctctcgaggagcttggcccattgcatacgttgtatccatatcataatatgtacatttatattggctcatgtccaacattaccgccatgttactagtgtcgacaggctcagaggcacacaggagtttctgggctcaccctgcccccttccaacccctcagttcccatcctccagcagctgtttgtgtgctgcctctgaagtccacactgaacaaacttcagcctactcatgtccctaaaatgggcaaacattgcaagcagcaaacagcaaacacacagccctccctgcctgctgaccttggagctggggcagaggtcagagacctctctgggcccatgccacctccaacatccactcgaccccttggaatttcggtggagaggagcagaggttgtcctggcgtggtttaggtagtgtgagaggggtcgacgatcttgctaccagtggaacagccactaaggattctgcagtgagagcagagggccagctaagtggtactctcccagagactgtctgactcacgccaccccctccaccttggacacaggacgctgtggtttctgagccaggtacaatgactcctttcggtaagtgcagtggaagctgtacactgcccaggcaaagcgtccgggcagcgtaggcgggcgactcagatcccagccagtggacttagcccctgtttgctcctccgataactggggtgaccttggttaatattcaccagcagcctcccccgttgcccctctggatccactgcttaaatacggacgaggacagggccctgtctcctcagcttcaggcaccaccactgacctgggacagtgaatcgtaagtatgcctttcactgcgagaggttctggagaggcttctgagctccccatggcccaggcaggcagcaggtctggggcaggaggggggttgtggagtgggtatccgcctgctgaggtgcagggcagatcatcatgtgccttgactcggggcctggcccccccatctctgtcttgcaggacaattgccgtcttctgtctcgtggggcatcctcctgctggcaggcctgtgctgcctggtccctgtctccctggctgaggaccgggtaccgccaccatgagcacagctgtcctggagaaccctggcctgggcaggaagctgtctgactttggccaggagacctcttacattgaggataactgcaaccagaatggagccatcagcctgatcttctcccttaaggaagaggtgggagctctggccaaagtgctcagactgtttgaagagaatgatgtgaacctgacccacattgagagcagacctagcaggctgaagaaagatgaatatgaattcttcacccacttggacaagagaagcctccctgccctgaccaacatcatcaaaatcctgaggcatgacataggagccactgttcatgagctcagcagagacaagaagaaagacacagtcccctggttcccaagaaccatccaggagctggacagatttgccaaccagatcctgagctatggggctgaactggatgctgaccaccctggcttcaaggaccctgtgtacagggccagaagaaagcagtttgctgacattgcctacaactacagacatggccaacccatccctagagtggaatacatggaggaagagaagaagacctggggcacagtgttcaaaaccctcaagagcctgtacaagacccacgcatgctatgagtacaaccacatcttccctctgctggagaagtactgtggcttccatgaggacaacatcccccagctggaggatgtgtcccagttcctgcagacctgtacaggcttcaggctgagacctgtggctggcctgctgagctccagagacttcctgggaggcctggccttcagagttttccactgcacccagtacatcagacacggctccaagcccatgtacacccctgaacctgacatctgccatgagctgctgggccacgtccccctgttctctgacagaagctttgcccagttcagccaagaaattggcctggccagcctgggtgcccctgatgagtacattgagaagctggccacaatctactggttcacagtggaatttggcctgtgcaagcagggagactccatcaaggcctatggtgctggcctgctgagcagctttggagagctgcagtactgcctgtcagaaaaacctaagctcctgcctctggagctggaaaaaacagccatccaaaactacacagtgacagagttccagcccctgtactatgtggctgagagcttcaatgatgccaaggagaaggtgaggaactttgcagccaccatccccagacctttctctgtgagatatgacccctacacccagagaatagaggtgctggataacacccagcaactgaagatcctggcagacagcatcaactctgagattggcatcctgtgctctgccctgcagaagatcaagtgaagatctgcctcgactgtgccttctagttgccagccatctgttgtttgcccctcccccgtgccttccttgaccctggaaggtgccactcccactgtcctttcctaataaaatgaggaaattgcatcgcattgtctgagtaggtgtcattctattctggggggtggggtggggcaggacagcaagggggaggattgggaagacaatagcaggcatgctggggatgcggtgggctctatggggcgcgccgtacccattgccaagttctgacaactgtctgtctatagccaattatgcatttcttaaattagaacccccccaatatacccaaatatatatatatgtgtgcatatatatagtaagttgtaacaaagttgtgaattcatacctgaagtatctcaagtgatgcaagttttatgaatttttgtttatgccttttgggaagagttgtattgacaaattttttatgcttaaagtaaaccataaatcaaaaaaataaaatctaggatgcaataaaacaaaacaacttcttgacataagtatggtatgtaaatctgttttgattggaaatcaatttgttatattgccagaattcctgttttagaatacatctctgctgatctgtctgtattcttagactgcatatctgggatgaactctgggcagaattcacatgggcttcctttgaaataaacaagacttttcaaattcttagtcgatctgcagaacctgtagccaggcactgaaccattttgatagatgcagtaatcgttgcaagtgtatatttcaaggagttctggctgggtcctagtttatgcttgtggcagaagcagtgagtaactgggaggaagttggtgagtaagcttcaaggaagaagtcatttttagtactctggatcttcctgattttaaagcactacaaaatggtgcattttcattcttgtcaagtgataacagatatattctgatgagcctgaaatgaatatatattgtatcatttttataatatctagcaaggtttgtattttcctagaacttgaactaaatttcagttcataaaatttataaaatacttagttgttgtaaaatatttttggaatgttcacataggtgacacacaaatgtcccattttcattctttctatagtaaatatgttctgatatgtgaaggtttagcagatgcatcagcatttaatcctagaggatctggcataatcttttcccccaagaatagaaattttttctgcttatgaaagtagtacatgtttctttaaaaacaaatcaatattgacttctgcctgctgtatagcactatgcctccacctggccatgaccaggggcatgtcctggtccacctacctgaaaatgtttgcaaccagcctcctggccatgtgcacaggggctgaagttgtcccacaggtattacgggccaacctgacaatacatgaagttccaccaaagtctgagaactcagaactgagctttggggactgaaagacagcacaaacctcaaatttctcagcactggaaacctcaaaatataactgaattccataaataagattttaagtcttaaatatgtatttttaaatgtattaaaagtcaagctgcttgtatttaagcacctaatacaatgcttaggttgtaaaaggagatgctcaataggtactaactgatatattgagatttaattatggtttgaccaatatttattggaaaccgccaaagcttaaatcatcagcttcttgaatgtgatttgaaaggtaatttagtattgaatagcatgtgagctagagtatttcattctttctggtttatttcttcaaatagactttgaatataatggtgaatgggtattataaattaactaataaaaatgacattgaaaatgaaaaaatatatatattaaagtgtagaaagtgaccaggcaccggtggatcccctaactacaaggaacccctagtgatggagttggccactccctctctgcgcgctcgctcgctcactgaggccgggcgaccaaaggtcgcccgacgcccgggctttgcccgggcggcctcagtgagcgagcgagcgcgcagagagggagtggccaa

SEQ ID NO: 94 - DNA, 9651 bp, synthetic construct
  source 1..9651: mol_type = other DNA
ctgctattaataactatgctcaaaaattgtgtacctttagctttttaatttgtaaaggggttaataaggaatatttgatgtatagtgccttgactagagatcataatcagccataccacatttgtagaggttttacttgctttaaaaaacctcccacacctccccctgaacctgaaacataaaatgaatgcaattgttgttgttctagcttggccactccctctctgcgcgctcgctcgctcactgaggccgggcgaccaaaggtcgcccgacgcccgggctttgcccgggcggcctcagtgagcgagcgagcgcgcagagagggagtggccaactccatcactaggggttcctctcgaggcggccgcaggctcagaggcacacaggagtttctgggctcaccctgcccccttccaacccctcagttcccatcctccagcagctgtttgtgtgctgcctctgaagtccacactgaacaaacttcagcctactcatgtccctaaaatgggcaaacattgcaagcagcaaacagcaaacacacagccctccctgcctgctgaccttggagctggggcagaggtcagagacctctctgggcccatgccacctccaacatccactcgaccccttggaatttcggtggagaggagcagaggttgtcctggcgtggtttaggtagtgtgagaggggtcgacgatcttgctaccagtggaacagccactaaggattctgcagtgagagcagagggccagctaagtggtactctcccagagactgtctgactcacgccaccccctccaccttggacacaggacgctgtggtttctgagccaggtacaatgactcctttcggtaagtgcagtggaagctgtacactgcccaggcaaagcgtccgggcagcgtaggcgggcgactcagatcccagccagtggacttagcccctgtttgctcctccgataactggggtgaccttggttaatattcaccagcagcctcccccgttgcccctctggatccactgcttaaatacggacgaggacagggccctgtctcctcagcttcaggcaccaccactgacctgggacagtgaatcgtaagtatgcctttcactgcgagaggttctggagaggcttctgagctccccatggcccaggcaggcagcaggtctggggcaggaggggggttgtggagtgggtatccgcctgctgaggtgcagggcagatcatcatgtgccttgactcggggcctggcccccccatctctgtcttgcaggacaattgccgtcttctgtctcgtggggcatcctcctgctggcaggcctgtgctgcctggtccctgtctccctggctgaggaccgggtaccgccaccatgtccactgcggtcctggaaaacccaggcttgggcaggaaactctctgactttggacaggaaacaagctatattgaagacaactgcaatcaaaatggtgccatatcactgatcttctcactcaaagaagaagttggtgcattggccaaagtattgcgcttatttgaggagaatgatgtaaacctgacccacattgaatctagaccttctcgtttaaagaaagatgagtatgaatttttcacccatttggataaacgtagcctgcctgctctgacaaacatcatcaagatcttgaggcatgacattggtgccactgtccatgagctttcacgagataagaagaaagacacagtgccctggttcccaagaaccattcaagagctggacagatttgccaatcagattctcagctatggagcggaactggatgctgaccaccctggttttaaagatcctgtgtaccgtgcaagacggaagcagtttgctgacattgcctacaactaccgccatgggcagcccatccctcgagtggaatacatggaggaagaaaagaaaacatggggcacagtgttcaagactctgaagtccttgtataaaacccatgcttgctatgagtacaatcacatttttccacttcttgaaaagtactgtggcttccatgaagataacattccccagctggaagacgtttctcagttcctgcagacttgcactggtttccgcctccgacctgtggctggcctgctttcctctcgggatttcttgggtggcctggccttccgagtcttccactgcacacagtacatcagacatggatccaagcccatgtatacccccgaacctgacatctgccatgagctgttgggacatgtgcccttgttttcagatcgcagctttgcccagttttcccaggaaattggccttgcctctctgggtgcacctgatgaatacattgaaaagctcgccacaatttactggtttactgtggagtttgggctctgcaaacaaggagactccataaaggcatatggtgctgggctcctgtcatcctttggtgaattacagtactgcttatcagagaagccaaagcttctccccctggagctggagaagacagccatccaaaattacactgtcacggagttccagcccctctattacgtggcagagagttttaatgatgccaaggagaaagtaaggaactttgctgccacaatacctcggcccttctcagttcgctacgacccatacacccaaaggattgaggtcttggacaatacccagcagcttaagattttggctgattccattaacagtgaaattggaatcctttgcagtgccctccagaaaataaagtaaagatctgcctcgactgtgccttctagttgccagccatctgttgtttgcccctcccccgtgccttccttgaccctggaaggtgccactcccactgtcctttcctaataaaatgaggaaattgcatcgcattgtctgagtaggtgtcattctattctggggggtggggtggggcaggacagcaagggggaggattgggaagacaatagcaggcatgctggggatgcggtgggctctatggatcccctaactacaaggaacccctagtgatggagttggccactccctctctgcgcgctcgctcgctcactgaggccgggcgaccaaaggtcgcccgacgcccgggctttgcccgggcggcctcagtgagcgagcgagcgcgcagagagggagtggccaacaggaagctcctctgtgtcctcataaaccctaacctcctctacttgagaggacattccaatcataggctgcccatccaccctctgtgtcctcctgttaattaggtcacttaacaaaaaggaaattgggtaggggtttttcacagaccgctttctaagggtaattttaaaatatctgggaagtcccttccactgctgtgttccagaagtgttggtaaacagcccacaaatgtcaacagcagaaacatacaagctgtcagctttgcacaagggcccaatctctggaagatccgcgcgtaccgagttctaattcactggccgtcgttttacaacgtcgtgactgggaaaaccctggcgttacccaacttaatcgccttgcagcacatccccctttcgccagctggcgtaatagcgaagaggcccgcaccgatcgcccttcccaacagttgcgcagcctgaatggcgaatggcgcctgatgcggtattttctccttacgcatctgtgcggtatttcacaccgcatatggtgcactctcagtacaatctgctctgatgccgcatagttaagccagccccgacacccgccaacacccgctgacgcgccctgacgggcttgtctgctcccggcatccgcttacagacaagctgtgaccgtctccgggagctgcatgtgtcagaggttttcaccgtcatcaccgaaacgcgcgagacgaaagggcctcgtgatacgcctatttttataggttaatgtcatgataataatggtttcttagacgtcaggtggcacttttcggggaaatgtgcgcggaacccccatttgtttatttttctaaatacattcaaatatgtatccgctcatgagacaataaccctgataaatgcttcaataatattgaaaaaggaagagtatgagccatattcaacgggaaacgtcttgctctaggccgcgattaaattccaacatggatgctgatttatatgggtataaatgggctcgcgataatgtcgggcaatcaggtgcgacaatctatcgattgtatgggaagcccgatgcgccagagttgtttctgaaacatggcaaaggtagcgttgccaatgatgttacagatgagatggtcagactaaactggctgacggaatttatgcctcttccgaccatcaagcattttatccgtactcctgatgatgcatggttactcaccactgcgatccctgggaaaacagcattccaggtattagaagaatatcctgattcaggtgaaaatattgttgatgcgctggcagtgttcctgcgccggttgcattcgattcctgtttgtaattgtccttttaacagcgatcgcgtatttcgtctcgctcaggcgcaatcacgaatgaataacggtttggttgatgcgagtgattttgatgacgagcgtaatggctggcctgttgaacaagtctggaaagaaatgcataaacttttgccattctcaccggattcagtcgtcactcatggtgatttctcacttgataaccttatttttgacgaggggaaattaataggttgtattgatgttggacgagtcggaatcgcagaccgataccaggatcttgccatcctatggaactgcctcggtgagttttctccttcattacagaaacggctttttcaaaaatatggtattgataatcctgatatgaataaattgcagtttcatttgatgctcgatgagtttttctaaaagcttgtgcaatgccacaaagaagagtcaatcgcagacaacattttgaatgcggtcacacgttagcagcatgattgccacggatggcaacatattaacggcatgatattgacttattgaataaaattgggtaaatttgactcaacgatgggttaattcgctcgttgtggtagtgagatgaaaagaggcggcgcttactaccgattccgcctagttggtcacttcgacgtatcgtctggaactccaaccatcgcaggcagagaggtctgcaaaatgcaatcccgaaacagttcgcaggtaatagttagagcctgcataacggtttcgggattttttatatctgcacaacaggtaagagcattgagtcgataatcgtgaagagtcggcgagcctggttagccagtgctctttccgttgtgctgaattaagcgaataccggaagcagaaccggatcaccaaatgcgtacaggcgtcatcgccgcccagcaacagcacaacccaaactgagccgtagccactgtctgtcctgaattcattagtaatagttacgctgcggccttttacacatgaccttcgtgaaagcgggtggcaggaggtcgcgctaacaacctcctgccgttttgcccgtgcatatcggtcacgaacaaatctgattactaaacacagtagcctggatttgttctatcagtaatcgaccttattcctaattaaatagagcaaatccccttattgggggtaagacatgaagatgccagaaaaacatgacctgttggccgccattctcgcggcaaaggaacaaggcatcggggcaatccttgcgtttgcaatggcgtaccttcgcggcagatataatggcggtgcgtttacaaaaacagtaatcgacgcaacgatgtgcgccattatcgcctggttcattcgtgaccttctcgacttcgccggactaagtagcaatctcgcttatataacgagcgtgtttatcggctacatcggtactgactcgattggttcgcttatcaaacgcttcgctgctaaaaaagccggagtagaagatggtagaaatcaataatcaacgtaaggcgttcctcgatatgctggcgtggtcggagggaactgataacggacgtcagaaaaccagaaatcatggttatgacgtcattgtaggcggagagctatttactgattactccgatcaccctcgcaaacttgtcacgctaaacccaaaactcaaatcaacaggcgccggacgctaccagcttctttcccgttggtgggatgcctaccgcaagcagcttggcctgaaagacttctctccgaaaagtcaggacgctgtggcattgcagcagattaaggagcgtggcgctttacctatgattgatcgtggtgatatccgtcaggcaatcgaccgttgcagcaatatctgggcttcactgccgggcgctggttatggtcagttcgagcataaggctgacagcctgattgcaaaattcaaagaagcgggcggaacggtcagagagattgatgtatgagcagagtcaccgcgattatctccgctctggttatctgcatcatcgtctgcctgtcatgggctgttaatcattaccgtgataacgccattacctacaaagcccagcgcgacaaaaatgccagagaactgaagctggcgaacgcggcaattactgacatgcagatgcgtcagcgtgatgttgctgcgctcgatgcaaaatacacgaaggagttagctgatgctaaagctgaaaatgatgctctgcgtgatgatgttgccgctggtcgtcgtcggttgcacatcaaagcagtctgtcagtcagtgcgtgaagccaccaccgcctccggcgtggataatgcagcctccccccgactggcagacaccgctgaacgggattatttcaccctcagagagaggctgatcactatgcaaaaacaactggaaggaacccagaagtatattaatgagcagtgcagatagagttgcccatatcgatgggcaactcatgcaattattgtgagcaatacacacgcgcttccagcggagtataaatgcctaaagtaataaaaccgagcaatccatttacgaatgtttgctgggtttctgttttaacaacattttctgcgccgccacaaattttggctgcatcgacagttttcttctgcccaattccagaaacgaagaaatgatgggtgatggtttcctttggtgctactgctgccggtttgttttgaacagtaaacgtctgttgagcacatcctgtaataagcagggccagcgcagtagcgagtagcatttttttcatggtgttattcccgatgctttttgaagttcgcagaatcgtatgtgtagaaaattaaacaaaccctaaacaatgagttgaaatttcatattgttaatatttattaatgtatgtcaggtgcgatgaatcgtcattgtattcccggattaactatgtccacagccctgacggggaacttctctgcgggagtgtccgggaataattaaaacgatgcacacagggtttagcgcgtacacgtattgcattatgccaacgccccggtgctgacacggaagaaaccggacgttatgatttagcgtggaaagatttgtgtagtgttctgaatgctctcagtaaatagtaatgaattatcaaaggtatagtaatatcttttatgttcatggatatttgtaacccatcggaaaactcctgctttagcaagattttccctgtattgctgaaatgtgatttctcttgatttcaacctatcataggacgtttctataagatgcgtgtttcttgagaatttaacatttacaacctttttaagtccttttattaacacggtgttatcgttttctaacacgatgtgaatattatctgtggctagatagtaaatataatgtgagacgttgtgacgtttgctagcctgtcagaccaagtttactcatatatactttagattgatttaaaacttcatttttaatttaaaaggatctaggtgaagatcctttttgataatctcatgaccaaaatcccttaacgtgagttttcgttccactgagcgtcagaccccgtagaaaagatcaaaggatcttcttgagatcctttttttctgcgcgtaatctgctgcttgcaaacaaaaaaaccaccgctaccagcggtggtttgtttgccggatcaagagctaccaactctttttccgaaggtaactggcttcagcagagcgcagataccaaatactgttcttctagtgtagccgtagttaggccaccacttcaagaactctgtagcaccgcctacatacctcgctctgctaatcctgttaccagtggctgctgccagtggcgataagtcgtgtcttaccgggttggactcaagacgatagttaccggataaggcgcagcggtcgggctgaacggggggttcgtgcacacagcccagcttggagcgaacgacctacaccgaactgagatacctacagcgtgagctatgagaaagcgccacgcttcccgaagggagaaaggcggacaggtatccggtaagcggcagggtcggaacaggagagcgcacgagggagcttccagggggaaacgcctggtatctttatagtcctgtcgggtttcgccacctctgacttgagcgtcgatttttgtgatgctcgtcaggggggcggagcctatggaaaaacgccagcaacgcggcctttttacggttcctggccttttgctggccttttgctcacatgttctttcctgcgttatcccctgattctgtggataaccgtattaccgcctttgagtgagctgataccgctcgccgcagccgaacgaccgagcgcagcgagtcagtgagcgaggaagcggaagagcgcccaatacgcaaaccgcctctccccgcgcgttggccgattcattaatgcagctggcacgacaggtttcccgactggaaagcgggcagtgagcgcaacgcaattaatgtgagttagctcactcattaggcaccccaggctttacactttatgcttccggctcgtatgttgtgtggaattgtgagcggataacaatttcacacaggaaacagctatgaccatgattacgccaagtttgcacgcctgccgttcgacgatttcgcgagttggttcagctgctgcctgaggctggacgacctcgcggagttctaccggcagtgcaaatccgtcggcatccaggaaaccagcagcggctatccgcgcatccatgcccccgaactgcaggagtggggaggcacgatggccgctttggtccggatctttgtgaaggaaccttacttctgtggtgtgacataattggacaaactacctacagagatttaaagctctaaggtaaatataaaatttttaagtgtataatgtgttaaactactgattctaattgtttgtgtattttagattccaacctatggaactgatgaatgggagcagtggtggaatgcctttaatgaggaaaacctgttttgctcagaagaaatgccatctagtgatgatgaggctactgctgactctcaacattctactcctccaaaaaagaagagaaaggtagaagaccccaaggactttccttcagaattgctaagttttttgagtcatgctgtgtttagtaatagaactcttgcttgctttgctatttacaccacaaaggaaaaagctgcactgctatacaagaaaattatggaaaaatattctgtaacctttataagtaggcataacagttataatcataacatactgttttttcttactccacacaggcatagagtgt

SEQ ID NO: 95 - DNA, 9651 bp, synthetic construct
  source 1..9651: mol_type = other DNA
ctgctattaataactatgctcaaaaattgtgtacctttagctttttaatttgtaaaggggttaataaggaatatttgatgtatagtgccttgactagagatcataatcagccataccacatttgtagaggttttacttgctttaaaaaacctcccacacctccccctgaacctgaaacataaaatgaatgcaattgttgttgttctagcttggccactccctctctgcgcgctcgctcgctcactgaggccgggcgaccaaaggtcgcccgacgcccgggctttgcccgggcggcctcagtgagcgagcgagcgcgcagagagggagtggccaactccatcactaggggttcctctcgaggcggccgcaggctcagaggcacacaggagtttctgggctcaccctgcccccttccaacccctcagttcccatcctccagcagctgtttgtgtgctgcctctgaagtccacactgaacaaacttcagcctactcatgtccctaaaatgggcaaacattgcaagcagcaaacagcaaacacacagccctccctgcctgctgaccttggagctggggcagaggtcagagacctctctgggcccatgccacctccaacatccactcgaccccttggaatttcggtggagaggagcagaggttgtcctggcgtggtttaggtagtgtgagaggggtcgacgatcttgctaccagtggaacagccactaaggattctgcagtgagagcagagggccagctaagtggtactctcccagagactgtctgactcacgccaccccctccaccttggacacaggacgctgtggtttctgagccaggtacaatgactcctttcggtaagtgcagtggaagctgtacactgcccaggcaaagcgtccgggcagcgtaggcgggcgactcagatcccagccagtggacttagcccctgtttgctcctccgataactggggtgaccttggttaatattcaccagcagcctcccccgttgcccctctggatccactgcttaaatacggacgaggacagggccctgtctcctcagcttcaggcaccaccactgacctgggacagtgaatcgtaagtatgcctttcactgcgagaggttctggagaggcttctgagctccccatggcccaggcaggcagcaggtctggggcaggaggggggttgtggagtgggtatccgcctgctgaggtgcagggcagatcatcatgtgccttgactcggggcctggcccccccatctctgtcttgcaggacaattgccgtcttctgtctcgtggggcatcctcctgctggcaggcctgtgctgcctggtccctgtctccctggctgaggaccgggtaccgccaccatgagcactgctgtgctggagaacccaggcctaggcagaaagctctcagactttggccaggaaaccagctacatagaggacaactgcaaccagaatggagccatctccctgatcttcagcctgaaggaggaagtgggagccctggccaaggtgctgagactgtttgaagagaatgatgtgaacctgacccacattgagagcagacccagcagactgaagaaggatgaatatgagttcttcacccacctggacaaaagaagcctgccagcccttaccaatatcatcaagatcctgagacatgacattggggccacagtgcatgagctgtccagagacaaaaaaaaggacacagtgccatggttccccaggaccatccaggagctggacagatttgccaaccagatcctgagctatggtgctgaactggatgcagatcaccctggcttcaaagaccctgtgtacagggccagaagaaagcagtttgctgacattgcctacaactacaggcatggccagcctatccccagagtggagtacatggaggaggagaagaagacctggggcacagtgttcaagacactgaagagcctgtacaagacccatgcctgctatgaatacaaccacatcttccctctcctggagaaatactgtggcttccatgaggacaacatccctcagctggaggatgtgagccaattcctgcagacctgcacaggcttcagactgagacctgttgctggcctgctgagcagcagagacttccttggaggcttagccttcagagtcttccactgcacccagtacatcagacatggctccaagcctatgtacacccctgagcctgacatctgccatgagctgctgggccatgtccccctgttctctgacagatcctttgcccaattcagccaggaaataggcctggcctccctgggagcccctgatgaatacatagaaaagctggccaccatctactggttcacagtggaatttggcctgtgcaaacagggagatagcatcaaggcctatggagcaggcctgctgagcagctttggagagctgcaatactgtctgtctgagaagcctaagctgctgcccctggaactggaaaagacagccatccagaactacacagtgacagaattccagcctctgtactatgtggctgagagcttcaatgatgccaaagagaaggtgaggaactttgctgccaccatccccaggcctttctctgtgagatatgacccctacacccagaggattgaggtgctggacaacacccagcagctgaagatcttagctgactctatcaactctgaaattggcatcctgtgttctgccctgcagaagatcaagtgaagatctgcctcgactgtgccttctagttgccagccatctgttgtttgcccctcccccgtgccttccttgaccctggaaggtgccactcccactgtcctttcctaataaaatgaggaaattgcatcgcattgtctgagtaggtgtcattctattctggggggtggggtggggcaggacagcaagggggaggattgggaagacaatagcaggcatgctggggatgcggtgggctctatggatcccctaactacaaggaacccctagtgatggagttggccactccctctctgcgcgctcgctcgctcactgaggccgggcgaccaaaggtcgcccgacgcccgggctttgcccgggcggcctcagtgagcgagcgagcgcgcagagagggagtggccaacaggaagctcctctgtgtcctcataaaccctaacctcctctacttgagaggacattccaatcataggctgcccatccaccctctgtgtcctcctgttaattaggtcacttaacaaaaaggaaattgggtaggggtttttcacagaccgctttctaagggtaattttaaaatatctgggaagtcccttccactgctgtgttccagaagtgttggtaaacagcccacaaatgtcaacagcagaaacatacaagctgtcagctttgcacaagggcccaatctctggaagatccgcgcgtaccgagttctaattcactggccgtcgttttacaacgtcgtgactgggaaaaccctggcgttacccaacttaatcgccttgcagcacatccccctttcgccagctggcgtaatagcgaagaggcccgcaccgatcgcccttcccaacagttgcgcagcctgaatggcgaatggcgcctgatgcggtattttctccttacgcatctgtgcggtatttcacaccgcatatggtgcactctcagtacaatctgctctgatgccgcatagttaagccagccccgacacccgccaacacccgctgacgcgccctgacgggcttgtctgctcccggcatccgcttacagacaagctgtgaccgtctccgggagctgcatgtgtcagaggttttcaccgtcatcaccgaaacgcgcgagacgaaagggcctcgtgatacgcctatttttataggttaatgtcatgataataatggtttcttagacgtcaggtggcacttttcggggaaatgtgcgcggaacccccatttgtttatttttctaaatacattcaaatatgtatccgctcatgagacaataaccctgataaatgcttcaataatattgaaaaaggaagagtatgagccatattcaacgggaaacgtcttgctctaggccgcgattaaattccaacatggatgctgatttatatgggtataaatgggctcgcgataatgtcgggcaatcaggtgcgacaatctatcgattgtatgggaagcccgatgcgccagagttgtttctgaaacatggcaaaggtagcgttgccaatgatgttacagatgagatggtcagactaaactggctgacggaatttatgcctcttccgaccatcaagcattttatccgtactcctgatgatgcatggttactcaccactgcgatccctgggaaaacagcattccaggtattagaagaatatcctgattcaggtgaaaatattgttgatgcgctggcagtgttcctgcgccggttgcattcgattcctgtttgtaattgtccttttaacagcgatcgcgtatttcgtctcgctcaggcgcaatcacgaatgaataacggtttggttgatgcgagtgattttgatgacgagcgtaatggctggcctgttgaacaagtctggaaagaaatgcataaacttttgccattctcaccggattcagtcgtcactcatggtgatttctcacttgataaccttatttttgacgaggggaaattaataggttgtattgatgttggacgagtcggaatcgcagaccgataccaggatcttgccatcctatggaactgcctcggtgagttttctccttcattacagaaacggctttttcaaaaatatggtattgataatcctgatatgaataaattgcagtttcatttgatgctcgatgagtttttctaaaagcttgtgcaatgccacaaagaagagtcaatcgcagacaacattttgaatgcggtcacacgttagcagcatgattgccacggatggcaacatattaacggcatgatattgacttattgaataaaattgggtaaatttgactcaacgatgggttaattcgctcgttgtggtagtgagatgaaaagaggcggcgcttactaccgattccgcctagttggtcacttcgacgtatcgtctggaactccaaccatcgcaggcagagaggtctgcaaaatgcaatcccgaaacagttcgcaggtaatagttagagcctgcataacggtttcgggattttttatatctgcacaacaggtaagagcattgagtcgataatcgtgaagagtcggcgagcctggttagccagtgctctttccgttgtgctgaattaagcgaataccggaagcagaaccggatcaccaaatgcgtacaggcgtcatcgccgcccagcaacagcacaacccaaactgagccgtagccactgtctgtcctgaattcattagtaatagttacgctgcggccttttacacatgaccttcgtgaaagcgggtggcaggaggtcgcgctaacaacctcctgccgttttgcccgtgcatatcggtcacgaacaaatctgattactaaacacagtagcctggatttgttctatcagtaatcgaccttattcctaattaaatagagcaaatccccttattgggggtaagacatgaagatgccagaaaaacatgacctgttggccgccattctcgcggcaaaggaacaaggcatcggggcaatccttgcgtttgcaatggcgtaccttcgcggcagatataatggcggtgcgtttacaaaaacagtaatcgacgcaacgatgtgcgccattatcgcctggttcattcgtgaccttctcgacttcgccggactaagtagcaatctcgcttatataacgagcgtgtttatcggctacatcggtactgactcgattggttcgcttatcaaacgcttcgctgctaaaaaagccggagtagaagatggtagaaatcaataatcaacgtaaggcgttcctcgatatgctggcgtggtcggagggaactgataacggacgtcagaaaaccagaaatcatggttatgacgtcattgtaggcggagagctatttactgattactccgatcaccctcgcaaacttgtcacgctaaacccaaaactcaaatcaacaggcgccggacgctaccagcttctttcccgttggtgggatgcctaccgcaagcagcttggcctgaaagacttctctccgaaaagtcaggacgctgtggcattgcagcagattaaggagcgtggcgctttacctatgattgatcgtggtgatatccgtcaggcaatcgaccgttgcagcaatatctgggcttcactgccgggcgctggttatggtcagttcgagcataaggctgacagcctgattgcaaaattcaaagaagcgggcggaacggtcagagagattgatgtatgagcagagtcaccgcgattatctccgctctggttatctgcatcatcgtctgcctgtcatgggctgttaatcattaccgtgataacgccattacctacaaagcccagcgcgacaaaaatgccagagaactgaagctggcgaacgcggcaattactgacatgcagatgcgtcagcgtgatgttgctgcgctcgatgcaaaatacacgaaggagttagctgatgctaaagctgaaaatgatgctctgcgtgatgatgttgccgctggtcgtcgtcggttgcacatcaaagcagtctgtcagtcagtgcgtgaagccaccaccgcctccggcgtggataatgcagcctccccccgactggcagacaccgctgaacgggattatttcaccctcagagagaggctgatcactatgcaaaaacaactggaaggaacccagaagtatattaatgagcagtgcagatagagttgcccatatcgatgggcaactcatgcaattattgtgagcaatacacacgcgcttccagcggagtataaatgcctaaagtaataaaaccgagcaatccatttacgaatgtttgctgggtttctgttttaacaacattttctgcgccgccacaaattttggctgcatcgacagttttcttctgcccaattccagaaacgaagaaatgatgggtgatggtttcctttggtgctactgctgccggtttgttttgaacagtaaacgtctgttgagcacatcctgtaataagcagggccagcgcagtagcgagtagcatttttttcatggtgttattcccgatgctttttgaagttcgcagaatcgtatgtgtagaaaattaaacaaaccctaaacaatgagttgaaatttcatattgttaatatttattaatgtatgtcaggtgcgatgaatcgtcattgtattcccggattaactatgtccacagccctgacggggaacttctctgcgggagtgtccgggaataattaaaacgatgcacacagggtttagcgcgtacacgtattgcattatgccaacgccccggtgctgacacggaagaaaccggacgttatgatttagcgtggaaagatttgtgtagtgttctgaatgctctcagtaaatagtaatgaattatcaaaggtatagtaatatcttttatgttcatggatatttgtaacccatcggaaaactcctgctttagcaagattttccctgtattgctgaaatgtgatttctcttgatttcaacctatcataggacgtttctataagatgcgtgtttcttgagaatttaacatttacaacctttttaagtccttttattaacacggtgttatcgttttctaacacgatgtgaatattatctgtggctagatagtaaatataatgtgagacgttgtgacgtttgctagcctgtcagaccaagtttactcatatatactttagattgatttaaaacttcatttttaatttaaaaggatctaggtgaagatcctttttgataatctcatgaccaaaatcccttaacgtgagttttcgttccactgagcgtcagaccccgtagaaaagatcaaaggatcttcttgagatcctttttttctgcgcgtaatctgctgcttgcaaacaaaaaaaccaccgctaccagcggtggtttgtttgccggatcaagagctaccaactctttttccgaaggtaactggcttcagcagagcgcagataccaaatactgttcttctagtgtagccgtagttaggccaccacttcaagaactctgtagcaccgcctacatacctcgctctgctaatcctgttaccagtggctgctgccagtggcgataagtcgtgtcttaccgggttggactcaagacgatagttaccggataaggcgcagcggtcgggctgaacggggggttcgtgcacacagcccagcttggagcgaacgacctacaccgaactgagatacctacagcgtgagctatgagaaagcgccacgcttcccgaagggagaaaggcggacaggtatccggtaagcggcagggtcggaacaggagagcgcacgagggagcttccagggggaaacgcctggtatctttatagtcctgtcgggtttcgccacctctgacttgagcgtcgatttttgtgatgctcgtcaggggggcggagcctatggaaaaacgccagcaacgcggcctttttacggttcctggccttttgctggccttttgctcacatgttctttcctgcgttatcccctgattctgtggataaccgtattaccgcctttgagtgagctgataccgctcgccgcagccgaacgaccgagcgcagcgagtcagtgagcgaggaagcggaagagcgcccaatacgcaaaccgcctctccccgcgcgttggccgattcattaatgcagctggcacgacaggtttcccgactggaaagcgggcagtgagcgcaacgcaattaatgtgagttagctcactcattaggcaccccaggctttacactttatgcttccggctcgtatgttgtgtggaattgtgagcggataacaatttcacacaggaaacagctatgaccatgattacgccaagtttgcacgcctgccgttcgacgatttcgcgagttggttcagctgctgcctgaggctggacgacctcgcggagttctaccggcagtgcaaatccgtcggcatccaggaaaccagcagcggctatccgcgcatccatgcccccgaactgcaggagtggggaggcacgatggccgctttggtccggatctttgtgaaggaaccttacttctgtggtgtgacataattggacaaactacctacagagatttaaagctctaaggtaaatataaaatttttaagtgtataatgtgttaaactactgattctaattgtttgtgtattttagattccaacctatggaactgatgaatgggagcagtggtggaatgcctttaatgaggaaaacctgttttgctcagaagaaatgccatctagtgatgatgaggctactgctgactctcaacattctactcctccaaaaaagaagagaaaggtagaagaccccaaggactttccttcagaattgctaagttttttgagtcatgctgtgtttagtaatagaactcttgcttgctttgctatttacaccacaaaggaaaaagctgcactgctatacaagaaaattatggaaaaatattctgtaacctttataagtaggcataacagttataatcataacatactgttttttcttactccacacaggcatagagtgt

SEQ ID NO: 96 - DNA, 9651 bp, synthetic construct
  source 1..9651: mol_type = other DNA
ctgctattaataactatgctcaaaaattgtgtacctttagctttttaatttgtaaaggggttaataaggaatatttgatgtatagtgccttgactagagatcataatcagccataccacatttgtagaggttttacttgctttaaaaaacctcccacacctccccctgaacctgaaacataaaatgaatgcaattgttgttgttctagcttggccactccctctctgcgcgctcgctcgctcactgaggccgggcgaccaaaggtcgcccgacgcccgggctttgcccgggcggcctcagtgagcgagcgagcgcgcagagagggagtggccaactccatcactaggggttcctctcgaggcggccgcaggctcagaggcacacaggagtttctgggctcaccctgcccccttccaacccctcagttcccatcctccagcagctgtttgtgtgctgcctctgaagtccacactgaacaaacttcagcctactcatgtccctaaaatgggcaaacattgcaagcagcaaacagcaaacacacagccctccctgcctgctgaccttggagctggggcagaggtcagagacctctctgggcccatgccacctccaacatccactcgaccccttggaatttcggtggagaggagcagaggttgtcctggcgtggtttaggtagtgtgagaggggtcgacgatcttgctaccagtggaacagccactaaggattctgcagtgagagcagagggccagctaagtggtactctcccagagactgtctgactcacgccaccccctccaccttggacacaggacgctgtggtttctgagccaggtacaatgactcctttcggtaagtgcagtggaagctgtacactgcccaggcaaagcgtccgggcagcgtaggcgggcgactcagatcccagccagtggacttagcccctgtttgctcctccgataactggggtgaccttggttaatattcaccagcagcctcccccgttgcccctctggatccactgcttaaatacggacgaggacagggccctgtctcctcagcttcaggcaccaccactgacctgggacagtgaatcgtaagtatgcctttcactgcgagaggttctggagaggcttctgagctccccatggcccaggcaggcagcaggtctggggcaggaggggggttgtggagtgggtatccgcctgctgaggtgcagggcagatcatcatgtgccttgactcggggcctggcccccccatctctgtcttgcaggacaattgccgtcttctgtctcgtggggcatcctcctgctggcaggcctgtgctgcctggtccctgtctccctggctgaggaccgggtaccgccaccatgtccacagctgtgctggagaatcctggcctgggcagaaagctgtctgactttggccaggagaccagctacattgaagacaactgcaaccagaatggggccatcagcctcatcttcagcctgaaggaggaggtgggtgccctagccaaggtgctgagactctttgaagaaaatgatgtgaacctgacccacatagaatctagaccttccagactgaagaaggatgaatatgagttcttcacccaccttgacaagagaagcctgccagccctgaccaacatcatcaagatcctgaggcatgacataggagccacagtccatgagctgagcagagacaaaaagaaggacacagtcccttggttccctaggaccatccaggaactggacaggtttgccaaccaaatcctgagctatggagctgagctggatgctgaccacccaggcttcaaagacccagtgtacagagccagaagaaagcagtttgcagacattgcctacaactacagacatggccaacctatccccagggttgaatacatggaagaggaaaagaagacctggggcacagtgttcaagaccctgaagagcctgtacaaaacccatgcctgctatgagtacaaccacatcttccccctgcttgagaaatactgtggcttccatgaggataacatcccccagctggaggatgtgtcccagttcctgcagacctgcactggcttcagactgagacctgtggctggcctcctgagcagcagagacttcctgggaggcctggccttcagagtgttccactgcacccaatacatcaggcatggcagcaaacccatgtacacccctgagcctgatatctgtcatgaactgctgggccatgtgccactgttctctgacagaagctttgcccagttcagccaggagattggcctggccagcctgggagcccctgatgagtacattgagaagctggccaccatctactggttcacagtggaatttggcctgtgcaagcagggagacagcatcaaggcctatggagctggcctgctgagcagctttggagagctgcagtactgcctgtctgagaagcccaaactgctgcctttggagctggagaagacagccatccagaactacacagtgacagagttccagcccctgtactatgtggctgagagcttcaatgatgccaaggaaaaggtgagaaactttgctgccacaatccctaggcctttctctgtgagatatgacccctacacccagagaatagaagtgctggacaacacccagcagctgaaaatcctggctgacagcatcaacagtgagataggcatcctgtgttctgccctgcagaagatcaagtgaagatctgcctcgactgtgccttctagttgccagccatctgttgtttgcccctcccccgtgccttccttgaccctggaaggtgccactcccactgtcctttcctaataaaatgaggaaattgcatcgcattgtctgagtaggtgtcattctattctggggggtggggtggggcaggacagcaagggggaggattgggaagacaatagcaggcatgctggggatgcggtgggctctatggatcccctaactacaaggaacccctagtgatggagttggccactccctctctgcgcgctcgctcgctcactgaggccgggcgaccaaaggtcgcccgacgcccgggctttgcccgggcggcctcagtgagcgagcgagcgcgcagagagggagtggccaacaggaagctcctctgtgtcctcataaaccctaacctcctctacttgagaggacattccaatcataggctgcccatccaccctctgtgtcctcctgttaattaggtcacttaacaaaaaggaaattgggtaggggtttttcacagaccgctttctaagggtaattttaaaatatctgggaagtcccttccactgctgtgttccagaagtgttggtaaacagcccacaaatgtcaacagcagaaacatacaagctgtcagctttgcacaagggcccaatctctggaagatccgcgcgtaccgagttctaattcactggccgtcgttttacaacgtcgtgactgggaaaaccctggcgttacccaacttaatcgccttgcagcacatccccctttcgccagctggcgtaatagcgaagaggcccgcaccgatcgcccttcccaacagttgcgcagcctgaatggcgaatggcgcctgatgcggtattttctccttacgcatctgtgcggtatttcacaccgcatatggtgcactctcagtacaatctgctctgatgccgcatagttaagccagccccgacacccgccaacacccgctgacgcgccctgacgggcttgtctgctcccggcatccgcttacagacaagctgtgaccgtctccgggagctgcatgtgtcagaggttttcaccgtcatcaccgaaacgcgcgagacgaaagggcctcgtgatacgcctatttttataggttaatgtcatgataataatggtttcttagacgtcaggtggcacttttcggggaaatgtgcgcggaacccccatttgtttatttttctaaatacattcaaatatgtatccgctcatgagacaataaccctgataaatgcttcaataatattgaaaaaggaagagtatgagccatattcaacgggaaacgtcttgctctaggccgcgattaaattccaacatggatgctgatttatatgggtataaatgggctcgcgataatgtcgggcaatcaggtgcgacaatctatcgattgtatgggaagcccgatgcgccagagttgtttctgaaacatggcaaaggtagcgttgccaatgatgttacagatgagatggtcagactaaactggctgacggaatttatgcctcttccgaccatcaagcattttatccgtactcctgatgatgcatggttactcaccactgcgatccctgggaaaacagcattccaggtattagaagaatatcctgattcaggtgaaaatattgttgatgcgctggcagtgttcctgcgccggttgcattcgattcctgtttgtaattgtccttttaacagcgatcgcgtatttcgtctcgctcaggcgcaatcacgaatgaataacggtttggttgatgcgagtgattttgatgacgagcgtaatggctggcctgttgaacaagtctggaaagaaatgcataaacttttgccattctcaccggattcagtcgtcactcatggtgatttctcacttgataaccttatttttgacgaggggaaattaataggttgtattgatgttggacgagtcggaatcgcagaccgataccaggatcttgccatcctatggaactgcctcggtgagttttctccttcattacagaaacggctttttcaaaaatatggtattgataatcctgatatgaataaattgcagtttcatttgatgctcgatgagtttttctaaaagcttgtgcaatgccacaaagaagagtcaatcgcagacaacattttgaatgcggtcacacgttagcagcatgattgccacggatggcaacatattaacggcatgatattgacttattgaataaaattgggtaaatttgactcaacgatgggttaattcgctcgttgtggtagtgagatgaaaagaggcggcgcttactaccgattccgcctagttggtcacttcgacgtatcgtctggaactccaaccatcgcaggcagagaggtctgcaaaatgcaatcccgaaacagttcgcaggtaatagttagagcctgcataacggtttcgggattttttatatctgcacaacaggtaagagcattgagtcgataatcgtgaagagtcggcgagcctggttagccagtgctctttccgttgtgctgaattaagcgaataccggaagcagaaccggatcaccaaatgcgtacaggcgtcatcgccgcccagcaacagcacaacccaaactgagccgtagccactgtctgtcctgaattcattagtaatagttacgctgcggccttttacacatgaccttcgtgaaagcgggtggcaggaggtcgcgctaacaacctcctgccgttttgcccgtgcatatcggtcacgaacaaatctgattactaaacacagtagcctggatttgttctatcagtaatcgaccttattcctaattaaatagagcaaatccccttattgggggtaagacatgaagatgccagaaaaacatgacctgttggccgccattctcgcggcaaaggaacaaggcatcggggcaatccttgcgtttgcaatggcgtaccttcgcggcagatataatggcggtgcgtttacaaaaacagtaatcgacgcaacgatgtgcgccattatcgcctggttcattcgtgaccttctcgacttcgccggactaagtagcaatctcgcttatataacgagcgtgtttatcggctacatcggtactgactcgattggttcgcttatcaaacgcttcgctgctaaaaaagccggagtagaagatggtagaaatcaataatcaacgtaaggcgttcctcgatatgctggcgtggtcggagggaactgataacggacgtcagaaaaccagaaatcatggttatgacgtcattgtaggcggagagctatttactgattactccgatcaccctcgcaaacttgtcacgctaaacccaaaactcaaatcaacaggcgccggacgctaccagcttctttcccgttggtgggatgcctaccgcaagcagcttggcctgaaagacttctctccgaaaagtcaggacgctgtggcattgcagcagattaaggagcgtggcgctttacctatgattgatcgtggtgatatccgtcaggcaatcgaccgttgcagcaatatctgggcttcactgccgggcgctggttatggtcagttcgagcataaggctgacagcctgattgcaaaattcaaagaagcgggcggaacggtcagagagattgatgtatgagcagagtcaccgcgattatctccgctctggttatctgcatcatcgtctgcctgtcatgggctgttaatcattaccgtgataacgccattacctacaaagcccagcgcgacaaaaatgccagagaactgaagctggcgaacgcggcaattactgacatgcagatgcgtcagcgtgatgttgctgcgctcgatgcaaaatacacgaaggagttagctgatgctaaagctgaaaatgatgctctgcgtgatgatgttgccgctggtcgtcgtcggttgcacatcaaagcagtctgtcagtcagtgcgtgaagccaccaccgcctccggcgtggataatgcagcctccccccgactggcagacaccgctgaacgggattatttcaccctcagagagaggctgatcactatgcaaaaacaactggaaggaacccagaagtatattaatgagcagtgcagatagagttgcccatatcgatgggcaactcatgcaattattgtgagcaatacacacgcgcttccagcggagtataaatgcctaaagtaataaaaccgagcaatccatttacgaatgtttgctgggtttctgttttaacaacattttctgcgccgccacaaattttggctgcatcgacagttttcttctgcccaattccagaaacgaagaaatgatgggtgatggtttcctttggtgctactgctgccggtttgttttgaacagtaaacgtctgttgagcacatcctgtaataagcagggccagcgcagtagcgagtagcatttttttcatggtgttattcccgatgctttttgaagttcgcagaatcgtatgtgtagaaaattaaacaaaccctaaacaatgagttgaaatttcatattgttaatatttattaatgtatgtcaggtgcgatgaatcgtcattgtattcccggattaactatgtccacagccctgacggggaacttctctgcgggagtgtccgggaataattaaaacgatgcacacagggtttagcgcgtacacgtattgcattatgccaacgccccggtgctgacacggaagaaaccggacgttatgatttagcgtggaaagatttgtgtagtgttctgaatgctctcagtaaatagtaatgaattatcaaaggtatagtaatatcttttatgttcatggatatttgtaacccatcggaaaactcctgctttagcaagattttccctgtattgctgaaatgtgatttctcttgatttcaacctatcataggacgtttctataagatgcgtgtttcttgagaatttaacatttacaacctttttaagtccttttattaacacggtgttatcgttttctaacacgatgtgaatattatctgtggctagatagtaaatataatgtgagacgttgtgacgtttgctagcctgtcagaccaagtttactcatatatactttagattgatttaaaacttcatttttaatttaaaaggatctaggtgaagatcctttttgataatctcatgaccaaaatcccttaacgtgagttttcgttccactgagcgtcagaccccgtagaaaagatcaaaggatcttcttgagatcctttttttctgcgcgtaatctgctgcttgcaaacaaaaaaaccaccgctaccagcggtggtttgtttgccggatcaagagctaccaactctttttccgaaggtaactggcttcagcagagcgcagataccaaatactgttcttctagtgtagccgtagttaggccaccacttcaagaactctgtagcaccgcctacatacctcgctctgctaatcctgttaccagtggctgctgccagtggcgataagtcgtgtcttaccgggttggactcaagacgatagttaccggataaggcgcagcggtcgggctgaacggggggttcgtgcacacagcccagcttggagcgaacgacctacaccgaactgagatacctacagcgtgagctatgagaaagcgccacgcttcccgaagggagaaaggcggacaggtatccggtaagcggcagggtcggaacaggagagcgcacgagggagcttccagggggaaacgcctggtatctttatagtcctgtcgggtttcgccacctctgacttgagcgtcgatttttgtgatgctcgtcaggggggcggagcctatggaaaaacgccagcaacgcggcctttttacggttcctggccttttgctggccttttgctcacatgttctttcctgcgttatcccctgattctgtggataaccgtattaccgcctttgagtgagctgataccgctcgccgcagccgaacgaccgagcgcagcgagtcagtgagcgaggaagcggaagagcgcccaatacgcaaaccgcctctccccgcgcgttggccgattcattaatgcagctggcacgacaggtttcccgactggaaagcgggcagtgagcgcaacgcaattaatgtgagttagctcactcattaggcaccccaggctttacactttatgcttccggctcgtatgttgtgtggaattgtgagcggataacaatttcacacaggaaacagctatgaccatgattacgccaagtttgcacgcctgccgttcgacgatttcgcgagttggttcagctgctgcctgaggctggacgacctcgcggagttctaccggcagtgcaaatccgtcggcatccaggaaaccagcagcggctatccgcgcatccatgcccccgaactgcaggagtggggaggcacgatggccgctttggtccggatctttgtgaaggaaccttacttctgtggtgtgacataattggacaaactacctacagagatttaaagctctaaggtaaatataaaatttttaagtgtataatgtgttaaactactgattctaattgtttgtgtattttagattccaacctatggaactgatgaatgggagcagtggtggaatgcctttaatgaggaaaacctgttttgctcagaagaaatgccatctagtgatgatgaggctactgctgactctcaacattctactcctccaaaaaagaagagaaaggtagaagaccccaaggactttccttcagaattgctaagttttttgagtcatgctgtgtttagtaatagaactcttgcttgctttgctatttacaccacaaaggaaaaagctgcactgctatacaagaaaattatggaaaaatattctgtaacctttataagtaggcataacagttataatcataacatactgttttttcttactccacacaggcatagagtgt

SEQ ID NO: 97 - DNA, 9651 bp, synthetic construct
  source 1..9651: mol_type = other DNA
ctgctattaataactatgctcaaaaattgtgtacctttagctttttaatttgtaaaggggttaataaggaatatttgatgtatagtgccttgactagagatcataatcagccataccacatttgtagaggttttacttgctttaaaaaacctcccacacctccccctgaacctgaaacataaaatgaatgcaattgttgttgttctagcttggccactccctctctgcgcgctcgctcgctcactgaggccgggcgaccaaaggtcgcccgacgcccgggctttgcccgggcggcctcagtgagcgagcgagcgcgcagagagggagtggccaactccatcactaggggttcctctcgaggcggccgcaggctcagaggcacacaggagtttctgggctcaccctgcccccttccaacccctcagttcccatcctccagcagctgtttgtgtgctgcctctgaagtccacactgaacaaacttcagcctactcatgtccctaaaatgggcaaacattgcaagcagcaaacagcaaacacacagccctccctgcctgctgaccttggagctggggcagaggtcagagacctctctgggcccatgccacctccaacatccactcgaccccttggaatttcggtggagaggagcagaggttgtcctggcgtggtttaggtagtgtgagaggggtcgacgatcttgctaccagtggaacagccactaaggattctgcagtgagagcagagggccagctaagtggtactctcccagagactgtctgactcacgccaccccctccaccttggacacaggacgctgtggtttctgagccaggtacaatgactcctttcggtaagtgcagtggaagctgtacactgcccaggcaaagcgtccgggcagcgtaggcgggcgactcagatcccagccagtggacttagcccctgtttgctcctccgataactggggtgaccttggttaatattcaccagcagcctcccccgttgcccctctggatccactgcttaaatacggacgaggacagggccctgtctcctcagcttcaggcaccaccactgacctgggacagtgaatcgtaagtatgcctttcactgcgagaggttctggagaggcttctgagctccccatggcccaggcaggcagcaggtctggggcaggaggggggttgtggagtgggtatccgcctgctgaggtgcagggcagatcatcatgtgccttgactcggggcctggcccccccatctctgtcttgcaggacaattgccgtcttctgtctcgtggggcatcctcctgctggcaggcctgtgctgcctggtccctgtctccctggctgaggaccgggtaccgccaccatgagcacagctgtgctggagaaccctggcctgggcaggaaactgtctgactttggccaggagaccagctacatagaggacaactgtaaccagaatggtgccatcagcctgatcttcagcctgaaggaagaagttggagccctggccaaggtgctgaggctgtttgaggagaatgatgtcaacctgacccacatagagagcagaccaagcagactcaaaaaggatgagtatgaattcttcacccacctggacaagaggagcctgcctgccctgaccaacatcatcaagatcctaaggcatgacattggagccacagtgcatgagctgagcagggacaagaagaaggacacagtgccctggttccccagaaccatccaggaactggacagatttgccaaccagatcctgagctatggtgctgagctggatgctgaccaccctggcttcaaggaccctgtgtacagagccagaaggaagcagtttgctgatattgcctacaactacagacatggccagcctatccccagagttgagtacatggaggaagagaaaaaaacctggggcacagtgttcaagaccctgaagtccctgtacaagacccatgcctgctatgagtacaaccacatcttccctctgctggaaaaatactgtggcttccatgaggacaacatccctcagctggaggatgtgtcccagttcctgcagacctgtacaggcttcagactgagacctgtggctggcctgctgagcagcagagatttcctgggaggcctggccttcagagtgttccactgcacccaatacatcagacatggcagcaagcctatgtacaccccagagcctgacatctgccatgagttgctgggccatgtgcccctgttctctgacagatcctttgcccagttctctcaggaaattggcctggccagcctgggagcccctgatgaatacattgaaaagctggccaccatctactggttcacagtggaatttggcctttgcaagcagggggactccatcaaggcctatggagctggcctgctgagcagctttggagaactgcaatactgcctgtctgaaaagcccaagctgctgcctttggagctggagaaaacagccatccagaactacacagtgactgagttccaaccactgtactatgtggctgagagcttcaatgatgccaaggaaaaggtgagaaactttgcagccacaatccctagacccttctcagtgagatatgacccttacacccagagaattgaagtgctggacaacacccagcagctcaagatcctggctgatagcatcaactctgagattggcatcctgtgctctgccctgcagaagatcaaatgaagatctgcctcgactgtgccttctagttgccagccatctgttgtttgcccctcccccgtgccttccttgaccctggaaggtgccactcccactgtcctttcctaataaaatgaggaaattgcatcgcattgtctgagtaggtgtcattctattctggggggtggggtggggcaggacagcaagggggaggattgggaagacaatagcaggcatgctggggatgcggtgggctctatggatcccctaactacaaggaacccctagtgatggagttggccactccctctctgcgcgctcgctcgctcactgaggccgggcgaccaaaggtcgcccgacgcccgggctttgcccgggcggcctcagtgagcgagcgagcgcgcagagagggagtggccaacaggaagctcctctgtgtcctcataaaccctaacctcctctacttgagaggacattccaatcataggctgcccatccaccctctgtgtcctcctgttaattaggtcacttaacaaaaaggaaattgggtaggggtttttcacagaccgctttctaagggtaattttaaaatatctgggaagtcccttccactgctgtgttccagaagtgttggtaaacagcccacaaatgtcaacagcagaaacatacaagctgtcagctttgcacaagggcccaatctctggaagatccgcgcgtaccgagttctaattcactggccgtcgttttacaacgtcgtgactgggaaaaccctggcgttacccaacttaatcgccttgcagcacatccccctttcgccagctggcgtaatagcgaagaggcccgcaccgatcgcccttcccaacagttgcgcagcctgaatggcgaatggcgcctgatgcggtattttctccttacgcatctgtgcggtatttcacaccgcatatggtgcactctcagtacaatctgctctgatgccgcatagttaagccagccccgacacccgccaacacccgctgacgcgccctgacgggcttgtctgctcccggcatccgcttacagacaagctgtgaccgtctccgggagctgcatgtgtcagaggttttcaccgtcatcaccgaaacgcgcgagacgaaagggcctcgtgatacgcctatttttataggttaatgtcatgataataatggtttcttagacgtcaggtggcacttttcggggaaatgtgcgcggaacccccatttgtttatttttctaaatacattcaaatatgtatccgctcatgagacaataaccctgataaatgcttcaataatattgaaaaaggaagagtatgagccatattcaacgggaaacgtcttgctctaggccgcgattaaattccaacatggatgctgatttatatgggtataaatgggctcgcgataatgtcgggcaatcaggtgcgacaatctatcgattgtatgggaagcccgatgcgccagagttgtttctgaaacatggcaaaggtagcgttgccaatgatgttacagatgagatggtcagactaaactggctgacggaatttatgcctcttccgaccatcaagcattttatccgtactcctgatgatgcatggttactcaccactgcgatccctgggaaaacagcattccaggtattagaagaatatcctgattcaggtgaaaatattgttgatgcgctggcagtgttcctgcgccggttgcattcgattcctgtttgtaattgtccttttaacagcgatcgcgtatttcgtctcgctcaggcgcaatcacgaatgaataacggtttggttgatgcgagtgattttgatgacgagcgtaatggctggcctgttgaacaagtctggaaagaaatgcataaacttttgccattctcaccggattcagtcgtcactcatggtgatttctcacttgataaccttatttttgacgaggggaaattaataggttgtattgatgttggacgagtcggaatcgcagaccgataccaggatcttgccatcctatggaactgcctcggtgagttttctccttcattacagaaacggctttttcaaaaatatggtattgataatcctgatatgaataaattgcagtttcatttgatgctcgatgagtttttctaaaagcttgtgcaatgccacaaagaagagtcaatcgcagacaacattttgaatgcggtcacacgttagcagcatgattgccacggatggcaacatattaacggcatgatattgacttattgaataaaattgggtaaatttgactcaacgatgggttaattcgctcgttgtggtagtgagatgaaaagaggcggcgcttactaccgattccgcctagttggtcacttcgacgtatcgtctggaactccaaccatcgcaggcagagaggtctgcaaaatgcaatcccgaaacagttcgcaggtaatagttagagcctgcataacggtttcgggattttttatatctgcacaacaggtaagagcattgagtcgataatcgtgaagagtcggcgagcctggttagccagtgctctttccgttgtgctgaattaagcgaataccggaagcagaaccggatcaccaaatgcgtacaggcgtcatcgccgcccagcaacagcacaacccaaactgagccgtagccactgtctgtcctgaattcattagtaatagttacgctgcggccttttacacatgaccttcgtgaaagcgggtggcaggaggtcgcgctaacaacctcctgccgttttgcccgtgcatatcggtcacgaacaaatctgattactaaacacagtagcctggatttgttctatcagtaatcgaccttattcctaattaaatagagcaaatccccttattgggggtaagacatgaagatgccagaaaaacatgacctgttggccgccattctcgcggcaaaggaacaaggcatcggggcaatccttgcgtttgcaatggcgtaccttcgcggcagatataatggcggtgcgtttacaaaaacagtaatcgacgcaacgatgtgcgccattatcgcctggttcattcgtgaccttctcgacttcgccggactaagtagcaatctcgcttatataacgagcgtgtttatcggctacatcggtactgactcgattggttcgcttatcaaacgcttcgctgctaaaaaagccggagtagaagatggtagaaatcaataatcaacgtaaggcgttcctcgatatgctggcgtggtcggagggaactgataacggacgtcagaaaaccagaaatcatggttatgacgtcattgtaggcggagagctatttactgattactccgatcaccctcgcaaacttgtcacgctaaacccaaaactcaaatcaacaggcgccggacgctaccagcttctttcccgttggtgggatgcctaccgcaagcagcttggcctgaaagacttctctccgaaaagtcaggacgctgtggcattgcagcagattaaggagcgtggcgctttacctatgattgatcgtggtgatatccgtcaggcaatcgaccgttgcagcaatatctgggcttcactgccgggcgctggttatggtcagttcgagcataaggctgacagcctgattgcaaaattcaaagaagcgggcggaacggtcagagagattgatgtatgagcagagtcaccgcgattatctccgctctggttatctgcatcatcgtctgcctgtcatgggctgttaatcattaccgtgataacgccattacctacaaagcccagcgcgacaaaaatgccagagaactgaagctggcgaacgcggcaattactgacatgcagatgcgtcagcgtgatgttgctgcgctcgatgcaaaatacacgaaggagttagctgatgctaaagctgaaaatgatgctctgcgtgatgatgttgccgctggtcgtcgtcggttgcacatcaaagcagtctgtcagtcagtgcgtgaagccaccaccgcctccggcgtggataatgcagcctccccccgactggcagacaccgctgaacgggattatttcaccctcagagagaggctgatcactatgcaaaaacaactggaaggaacccagaagtatattaatgagcagtgcagatagagttgcccatatcgatgggcaactcatgcaattattgtgagcaatacacacgcgcttccagcggagtataaatgcctaaagtaataaaaccgagcaatccatttacgaatgtttgctgggtttctgttttaacaacattttctgcgccgccacaaattttggctgcatcgacagttttcttctgcccaattccagaaacgaagaaatgatgggtgatggtttcctttggtgctactgctgccggtttgttttgaacagtaaacgtctgttgagcacatcctgtaataagcagggccagcgcagtagcgagtagcatttttttcatggtgttattcccgatgctttttgaagttcgcagaatcgtatgtgtagaaaattaaacaaaccctaaacaatgagttgaaatttcatattgttaatatttattaatgtatgtcaggtgcgatgaatcgtcattgtattcccggattaactatgtccacagccctgacggggaacttctctgcgggagtgtccgggaataattaaaacgatgcacacagggtttagcgcgtacacgtattgcattatgccaacgccccggtgctgacacggaagaaaccggacgttatgatttagcgtggaaagatttgtgtagtgttctgaatgctctcagtaaatagtaatgaattatcaaaggtatagtaatatcttttatgttcatggatatttgtaacccatcggaaaactcctgctttagcaagattttccctgtattgctgaaatgtgatttctcttgatttcaacctatcataggacgtttctataagatgcgtgtttcttgagaatttaacatttacaacctttttaagtccttttattaacacggtgttatcgttttctaacacgatgtgaatattatctgtggctagatagtaaatataatgtgagacgttgtgacgtttgctagcctgtcagaccaagtttactcatatatactttagattgatttaaaacttcatttttaatttaaaaggatctaggtgaagatcctttttgataatctcatgaccaaaatcccttaacgtgagttttcgttccactgagcgtcagaccccgtagaaaagatcaaaggatcttcttgagatcctttttttctgcgcgtaatctgctgcttgcaaacaaaaaaaccaccgctaccagcggtggtttgtttgccggatcaagagctaccaactctttttccgaaggtaactggcttcagcagagcgcagataccaaatactgttcttctagtgtagccgtagttaggccaccacttcaagaactctgtagcaccgcctacatacctcgctctgctaatcctgttaccagtggctgctgccagtggcgataagtcgtgtcttaccgggttggactcaagacgatagttaccggataaggcgcagcggtcgggctgaacggggggttcgtgcacacagcccagcttggagcgaacgacctacaccgaactgagatacctacagcgtgagctatgagaaagcgccacgcttcccgaagggagaaaggcggacaggtatccggtaagcggcagggtcggaacaggagagcgcacgagggagcttccagggggaaacgcctggtatctttatagtcctgtcgggtttcgccacctctgacttgagcgtcgatttttgtgatgctcgtcaggggggcggagcctatggaaaaacgccagcaacgcggcctttttacggttcctggccttttgctggccttttgctcacatgttctttcctgcgttatcccctgattctgtggataaccgtattaccgcctttgagtgagctgataccgctcgccgcagccgaacgaccgagcgcagcgagtcagtgagcgaggaagcggaagagcgcccaatacgcaaaccgcctctccccgcgcgttggccgattcattaatgcagctggcacgacaggtttcccgactggaaagcgggcagtgagcgcaacgcaattaatgtgagttagctcactcattaggcaccccaggctttacactttatgcttccggctcgtatgttgtgtggaattgtgagcggataacaatttcacacaggaaacagctatgaccatgattacgccaagtttgcacgcctgccgttcgacgatttcgcgagttggttcagctgctgcctgaggctggacgacctcgcggagttctaccggcagtgcaaatccgtcggcatccaggaaaccagcagcggctatccgcgcatccatgcccccgaactgcaggagtggggaggcacgatggccgctttggtccggatctttgtgaaggaaccttacttctgtggtgtgacataattggacaaactacctacagagatttaaagctctaaggtaaatataaaatttttaagtgtataatgtgttaaactactgattctaattgtttgtgtattttagattccaacctatggaactgatgaatgggagcagtggtggaatgcctttaatgaggaaaacctgttttgctcagaagaaatgccatctagtgatgatgaggctactgctgactctcaacattctactcctccaaaaaagaagagaaaggtagaagaccccaaggactttccttcagaattgctaagttttttgagtcatgctgtgtttagtaatagaactcttgcttgctttgctatttacaccacaaaggaaaaagctgcactgctatacaagaaaattatggaaaaatattctgtaacctttataagtaggcataacagttataatcataacatactgttttttcttactccacacaggcatagagtgt

SEQ ID NO: 98 - DNA, 9651 bp, synthetic construct
  source 1..9651: mol_type = other DNA
ctgctattaataactatgctcaaaaattgtgtacctttagctttttaatttgtaaaggggttaataaggaatatttgatgtatagtgccttgactagagatcataatcagccataccacatttgtagaggttttacttgctttaaaaaacctcccacacctccccctgaacctgaaacataaaatgaatgcaattgttgttgttctagcttggccactccctctctgcgcgctcgctcgctcactgaggccgggcgaccaaaggtcgcccgacgcccgggctttgcccgggcggcctcagtgagcgagcgagcgcgcagagagggagtggccaactccatcactaggggttcctctcgaggcggccgcaggctcagaggcacacaggagtttctgggctcaccctgcccccttccaacccctcagttcccatcctccagcagctgtttgtgtgctgcctctgaagtccacactgaacaaacttcagcctactcatgtccctaaaatgggcaaacattgcaagcagcaaacagcaaacacacagccctccctgcctgctgaccttggagctggggcagaggtcagagacctctctgggcccatgccacctccaacatccactcgaccccttggaatttcggtggagaggagcagaggttgtcctggcgtggtttaggtagtgtgagaggggtcgacgatcttgctaccagtggaacagccactaaggattctgcagtgagagcagagggccagctaagtggtactctcccagagactgtctgactcacgccaccccctccaccttggacacaggacgctgtggtttctgagccaggtacaatgactcctttcggtaagtgcagtggaagctgtacactgcccaggcaaagcgtccgggcagcgtaggcgggcgactcagatcccagccagtggacttagcccctgtttgctcctccgataactggggtgaccttggttaatattcaccagcagcctcccccgttgcccctctggatccactgcttaaatacggacgaggacagggccctgtctcctcagcttcaggcaccaccactgacctgggacagtgaatcgtaagtatgcctttcactgcgagaggttctggagaggcttctgagctccccatggcccaggcaggcagcaggtctggggcaggaggggggttgtggagtgggtatccgcctgctgaggtgcagggcagatcatcatgtgccttgactcggggcctggcccccccatctctgtcttgcaggacaattgccgtcttctgtctcgtggggcatcctcctgctggcaggcctgtgctgcctggtccctgtctccctggctgaggaccgggtaccgccaccatgagcacagctgtgctggagaaccctggcctgggcagaaaactgtctgactttggccaggaaacctcctacatagaagacaactgcaaccagaatggagccatcagcctgatcttcagcctgaaggaggaggtaggtgccctggccaaggtgctgagactgtttgaggagaatgatgtgaacctaacccacattgagagcaggcctagcagactgaagaaggatgaatatgagttcttcacccaccttgacaaaagatcactccctgccctgaccaacatcatcaagatcctgagacatgatataggagccactgtgcatgaactgagcagggacaagaagaaggacacagtgccctggttccccagaacaatccaggagctggacagatttgccaaccagatcctgagctatggagcagaactggatgctgaccacccaggcttcaaggaccctgtgtacagagccagaagaaagcagtttgctgacattgcctacaactacagacatggccagcccatccccagggttgaatacatggaggaggaaaagaagacctggggcacagtgttcaaaaccctgaaatccctgtacaaaacccatgcctgttatgaatacaaccacatcttccccctgcttgagaagtactgtggcttccatgaagataacatccctcagctggaggatgtgagccagttcctgcagacctgcacaggcttcagactgagacctgtggctggcctgctgagcagcagggacttcttaggaggcctggccttcagagtgttccactgcacccagtacatcagacatggcagcaagcccatgtacacccctgagcctgacatctgccatgagctgctgggccatgtccctctgttctctgacagaagctttgcccaattctcccaggagattggcctggccagccttggggccccagatgagtacattgagaagctggccaccatctactggttcacagtggagtttggcctgtgcaaacagggagacagcatcaaggcctatggagctggcctgctgagcagctttggagaactgcagtactgtctgagtgaaaagcctaagctgctgccactggagctggagaagacagccatccaaaactacacagtgacagagttccagcctctgtactatgtggctgaaagcttcaatgatgccaaggaaaaggtgagaaactttgctgccaccatccctaggcctttctctgtgagatatgacccctacacccaaagaattgaggtcctggacaacacccagcagttaaaaatcctggctgactctatcaactctgaaattggcatcctgtgctctgccctgcagaagatcaagtgaagatctgcctcgactgtgccttctagttgccagccatctgttgtttgcccctcccccgtgccttccttgaccctggaaggtgccactcccactgtcctttcctaataaaatgaggaaattgcatcgcattgtctgagtaggtgtcattctattctggggggtggggtggggcaggacagcaagggggaggattgggaagacaatagcaggcatgctggggatgcggtgggctctatggatcccctaactacaaggaacccctagtgatggagttggccactccctctctgcgcgctcgctcgctcactgaggccgggcgaccaaaggtcgcccgacgcccgggctttgcccgggcggcctcagtgagcgagcgagcgcgcagagagggagtggccaacaggaagctcctctgtgtcctcataaaccctaacctcctctacttgagaggacattccaatcataggctgcccatccaccctctgtgtcctcctgttaattaggtcacttaacaaaaaggaaattgggtaggggtttttcacagaccgctttctaagggtaattttaaaatatctgggaagtcccttccactgctgtgttccagaagtgttggtaaacagcccacaaatgtcaacagcagaaacatacaagctgtcagctttgcacaagggcccaatctctggaagatccgcgcgtaccgagttctaattcactggccgtcgttttacaacgtcgtgactgggaaaaccctggcgttacccaacttaatcgccttgcagcacatccccctttcgccagctggcgtaatagcgaagaggcccgcaccgatcgcccttcccaacagttgcgcagcctgaatggcgaatggcgcctgatgcggtattttctccttacgcatctgtgcggtatttcacaccgcatatggtgcactctcagtacaatctgctctgatgccgcatagttaagccagccccgacacccgccaacacccgctgacgcgccctgacgggcttgtctgctcccggcatccgcttacagacaagctgtgaccgtctccgggagctgcatgtgtcagaggttttcaccgtcatcaccgaaacgcgcgagacgaaagggcctcgtgatacgcctatttttataggttaatgtcatgataataatggtttcttagacgtcaggtggcacttttcggggaaatgtgcgcggaacccccatttgtttatttttctaaatacattcaaatatgtatccgctcatgagacaataaccctgataaatgcttcaataatattgaaaaaggaagagtatgagccatattcaacgggaaacgtcttgctctaggccgcgattaaattccaacatggatgctgatttatatgggtataaatgggctcgcgataatgtcgggcaatcaggtgcgacaatctatcgattgtatgggaagcccgatgcgccagagttgtttctgaaacatggcaaaggtagcgttgccaatgatgttacagatgagatggtcagactaaactggctgacggaatttatgcctcttccgaccatcaagcattttatccgtactcctgatgatgcatggttactcaccactgcgatccctgggaaaacagcattccaggtattagaagaatatcctgattcaggtgaaaatattgttgatgcgctggcagtgttcctgcgccggttgcattcgattcctgtttgtaattgtccttttaacagcgatcgcgtatttcgtctcgctcaggcgcaatcacgaatgaataacggtttggttgatgcgagtgattttgatgacgagcgtaatggctggcctgttgaacaagtctggaaagaaatgcataaacttttgccattctcaccggattcagtcgtcactcatggtgatttctcacttgataaccttatttttgacgaggggaaattaataggttgtattgatgttggacgagtcggaatcgcagaccgataccaggatcttgccatcctatggaactgcctcggtgagttttctccttcattacagaaacggctttttcaaaaatatggtattgataatcctgatatgaataaattgcagtttcatttgatgctcgatgagtttttctaaaagcttgtgcaatgccacaaagaagagtcaatcgcagacaacattttgaatgcggtcacacgttagcagcatgattgccacggatggcaacatattaacggcatgatattgacttattgaataaaattgggtaaatttgactcaacgatgggttaattcgctcgttgtggtagtgagatgaaaagaggcggcgcttactaccgattccgcctagttggtcacttcgacgtatcgtctggaactccaaccatcgcaggcagagaggtctgcaaaatgcaatcccgaaacagttcgcaggtaatagttagagcctgcataacggtttcgggattttttatatctgcacaacaggtaagagcattgagtcgataatcgtgaagagtcggcgagcctggttagccagtgctctttccgttgtgctgaattaagcgaataccggaagcagaaccggatcaccaaatgcgtacaggcgtcatcgccgcccagcaacagcacaacccaaactgagccgtagccactgtctgtcctgaattcattagtaatagttacgctgcggccttttacacatgaccttcgtgaaagcgggtggcaggaggtcgcgctaacaacctcctgccgttttgcccgtgcatatcggtcacgaacaaatctgattactaaacacagtagcctggatttgttctatcagtaatcgaccttattcctaattaaatagagcaaatccccttattgggggtaagacatgaagatgccagaaaaacatgacctgttggccgccattctcgcggcaaaggaacaaggcatcggggcaatccttgcgtttgcaatggcgtaccttcgcggcagatataatggcggtgcgtttacaaaaacagtaatcgacgcaacgatgtgcgccattatcgcctggttcattcgtgaccttctcgacttcgccggactaagtagcaatctcgcttatataacgagcgtgtttatcggctacatcggtactgactcgattggttcgcttatcaaacgcttcgctgctaaaaaagccggagtagaagatggtagaaatcaataatcaacgtaaggcgttcctcgatatgctggcgtggtcggagggaactgataacggacgtcagaaaaccagaaatcatggttatgacgtcattgtaggcggagagctatttactgattactccgatcaccctcgcaaacttgtcacgctaaacccaaaactcaaatcaacaggcgccggacgctaccagcttctttcccgttggtgggatgcctaccgcaagcagcttggcctgaaagacttctctccgaaaagtcaggacgctgtggcattgcagcagattaaggagcgtggcgctttacctatgattgatcgtggtgatatccgtcaggcaatcgaccgttgcagcaatatctgggcttcactgccgggcgctggttatggtcagttcgagcataaggctgacagcctgattgcaaaattcaaagaagcgggcggaacggtcagagagattgatgtatgagcagagtcaccgcgattatctccgctctggttatctgcatcatcgtctgcctgtcatgggctgttaatcattaccgtgataacgccattacctacaaagcccagcgcgacaaaaatgccagagaactgaagctggcgaacgcggcaattactgacatgcagatgcgtcagcgtgatgttgctgcgctcgatgcaaaatacacgaaggagttagctgatgctaaagctgaaaatgatgctctgcgtgatgatgttgccgctggtcgtcgtcggttgcacatcaaagcagtctgtcagtcagtgcgtgaagccaccaccgcctccggcgtggataatgcagcctccccccgactggcagacaccgctgaacgggattatttcaccctcagagagaggctgatcactatgcaaaaacaactggaaggaacccagaagtatattaatgagcagtgcagatagagttgcccatatcgatgggcaactcatgcaattattgtgagcaatacacacgcgcttccagcggagtataaatgcctaaagtaataaaaccgagcaatccatttacgaatgtttgctgggtttctgttttaacaacattttctgcgccgccacaaattttggctgcatcgacagttttcttctgcccaattccagaaacgaagaaatgatgggtgatggtttcctttggtgctactgctgccggtttgttttgaacagtaaacgtctgttgagcacatcctgtaataagcagggccagcgcagtagcgagtagcatttttttcatggtgttattcccgatgctttttgaagttcgcagaatcgtatgtgtagaaaattaaacaaaccctaaacaatgagttgaaatttcatattgttaatatttattaatgtatgtcaggtgcgatgaatcgtcattgtattcccggattaactatgtccacagccctgacggggaacttctctgcgggagtgtccgggaataattaaaacgatgcacacagggtttagcgcgtacacgtattgcattatgccaacgccccggtgctgacacggaagaaaccggacgttatgatttagcgtggaaagatttgtgtagtgttctgaatgctctcagtaaatagtaatgaattatcaaaggtatagtaatatcttttatgttcatggatatttgtaacccatcggaaaactcctgctttagcaagattttccctgtattgctgaaatgtgatttctcttgatttcaacctatcataggacgtttctataagatgcgtgtttcttgagaatttaacatttacaacctttttaagtccttttattaacacggtgttatcgttttctaacacgatgtgaatattatctgtggctagatagtaaatataatgtgagacgttgtgacgtttgctagcctgtcagaccaagtttactcatatatactttagattgatttaaaacttcatttttaatttaaaaggatctaggtgaagatcctttttgataatctcatgaccaaaatcccttaacgtgagttttcgttccactgagcgtcagaccccgtagaaaagatcaaaggatcttcttgagatcctttttttctgcgcgtaatctgctgcttgcaaacaaaaaaaccaccgctaccagcggtggtttgtttgccggatcaagagctaccaactctttttccgaaggtaactggcttcagcagagcgcagataccaaatactgttcttctagtgtagccgtagttaggccaccacttcaagaactctgtagcaccgcctacatacctcgctctgctaatcctgttaccagtggctgctgccagtggcgataagtcgtgtcttaccgggttggactcaagacgatagttaccggataaggcgcagcggtcgggctgaacggggggttcgtgcacacagcccagcttggagcgaacgacctacaccgaactgagatacctacagcgtgagctatgagaaagcgccacgcttcccgaagggagaaaggcggacaggtatccggtaagcggcagggtcggaacaggagagcgcacgagggagcttccagggggaaacgcctggtatctttatagtcctgtcgggtttcgccacctctgacttgagcgtcgatttttgtgatgctcgtcaggggggcggagcctatggaaaaacgccagcaacgcggcctttttacggttcctggccttttgctggccttttgctcacatgttctttcctgcgttatcccctgattctgtggataaccgtattaccgcctttgagtgagctgataccgctcgccgcagccgaacgaccgagcgcagcgagtcagtgagcgaggaagcggaagagcgcccaatacgcaaaccgcctctccccgcgcgttggccgattcattaatgcagctggcacgacaggtttcccgactggaaagcgggcagtgagcgcaacgcaattaatgtgagttagctcactcattaggcaccccaggctttacactttatgcttccggctcgtatgttgtgtggaattgtgagcggataacaatttcacacaggaaacagctatgaccatgattacgccaagtttgcacgcctgccgttcgacgatttcgcgagttggttcagctgctgcctgaggctggacgacctcgcggagttctaccggcagtgcaaatccgtcggcatccaggaaaccagcagcggctatccgcgcatccatgcccccgaactgcaggagtggggaggcacgatggccgctttggtccggatctttgtgaaggaaccttacttctgtggtgtgacataattggacaaactacctacagagatttaaagctctaaggtaaatataaaatttttaagtgtataatgtgttaaactactgattctaattgtttgtgtattttagattccaacctatggaactgatgaatgggagcagtggtggaatgcctttaatgaggaaaacctgttttgctcagaagaaatgccatctagtgatgatgaggctactgctgactctcaacattctactcctccaaaaaagaagagaaaggtagaagaccccaaggactttccttcagaattgctaagttttttgagtcatgctgtgtttagtaatagaactcttgcttgctttgctatttacaccacaaaggaaaaagctgcactgctatacaagaaaattatggaaaaatattctgtaacctttataagtaggcataacagttataatcataacatactgttttttcttactccacacaggcatagagtgt

SEQ ID NO: 99 - DNA, 9651 bp, synthetic construct
  source 1..9651: mol_type = other DNA
ctgctattaataactatgctcaaaaattgtgtacctttagctttttaatttgtaaaggggttaataaggaatatttgatgtatagtgccttgactagagatcataatcagccataccacatttgtagaggttttacttgctttaaaaaacctcccacacctccccctgaacctgaaacataaaatgaatgcaattgttgttgttctagcttggccactccctctctgcgcgctcgctcgctcactgaggccgggcgaccaaaggtcgcccgacgcccgggctttgcccgggcggcctcagtgagcgagcgagcgcgcagagagggagtggccaactccatcactaggggttcctctcgaggcggccgcaggctcagaggcacacaggagtttctgggctcaccctgcccccttccaacccctcagttcccatcctccagcagctgtttgtgtgctgcctctgaagtccacactgaacaaacttcagcctactcatgtccctaaaatgggcaaacattgcaagcagcaaacagcaaacacacagccctccctgcctgctgaccttggagctggggcagaggtcagagacctctctgggcccatgccacctccaacatccactcgaccccttggaatttcggtggagaggagcagaggttgtcctggcgtggtttaggtagtgtgagaggggtcgacgatcttgctaccagtggaacagccactaaggattctgcagtgagagcagagggccagctaagtggtactctcccagagactgtctgactcacgccaccccctccaccttggacacaggacgctgtggtttctgagccaggtacaatgactcctttcggtaagtgcagtggaagctgtacactgcccaggcaaagcgtccgggcagcgtaggcgggcgactcagatcccagccagtggacttagcccctgtttgctcctccgataactggggtgaccttggttaatattcaccagcagcctcccccgttgcccctctggatccactgcttaaatacggacgaggacagggccctgtctcctcagcttcaggcaccaccactgacctgggacagtgaatcgtaagtatgcctttcactgcgagaggttctggagaggcttctgagctccccatggcccaggcaggcagcaggtctggggcaggaggggggttgtggagtgggtatccgcctgctgaggtgcagggcagatcatcatgtgccttgactcggggcctggcccccccatctctgtcttgcaggacaattgccgtcttctgtctcgtggggcatcctcctgctggcaggcctgtgctgcctggtccctgtctccctggctgaggaccgggtaccgccaccatgagcacagctgtgctggagaacccaggcttgggcagaaagctgtctgactttggccaggagaccagctacattgaggacaactgcaaccaaaatggtgccatctccctgatcttcagcctcaaggaggaagttggagccctggccaaagtgttaagactgtttgaagaaaatgatgtgaacctgacccacattgaaagcagacctagcagactgaagaaagatgagtatgagttcttcacccacctggataagagaagcctgcctgccctgaccaacatcatcaagatcctgagacatgacataggggccacagtgcatgagctgagcagagacaaaaaaaaagacacagtgccttggttccccaggacaatccaggagctggacagatttgccaaccagatcctgagctatggagctgagctggatgctgaccaccctggcttcaaggaccctgtctacagagccaggaggaagcagtttgctgatattgcctacaactacagacatggccaacccatccctagagttgagtacatggaggaagaaaaaaagacctggggcacagtgttcaagaccctgaagagcctgtacaagacccatgcctgctatgagtacaatcacatcttccccctgctggagaagtactgtggcttccatgaagacaacatccctcagctggaagatgtgagccagttcctgcagacctgcacaggcttcagactgagacctgtggcaggcctgctgagcagcagagacttcctgggaggcctggccttcagagtgttccactgtacccaatacatcagacatggcagcaagcccatgtacaccccagagcctgacatctgccatgagctgctgggccatgtgcccctgttctctgacaggagctttgcccagttcagccaggagataggccttgccagcctgggagcccctgatgaatacatagagaagttagccaccatctactggttcacagtggaatttggcctgtgcaagcagggagactccatcaaggcctatggagcaggcctgctgtcctcttttggagagctgcagtactgcctgtctgagaagcccaagctactgcctttagagctggaaaagacagccatccagaactacacagtcacagagttccagccactgtactatgtggctgaaagcttcaatgatgccaaggagaaggtgagaaactttgctgccaccatccccagacctttctctgtgagatatgacccttacacccagaggattgaagtgctggacaacacccagcagctgaaaatcctggctgacagcatcaactctgaaattggcatcctgtgttctgccctgcagaagatcaagtgaagatctgcctcgactgtgccttctagttgccagccatctgttgtttgcccctcccccgtgccttccttgaccctggaaggtgccactcccactgtcctttcctaataaaatgaggaaattgcatcgcattgtctgagtaggtgtcattctattctggggggtggggtggggcaggacagcaagggggaggattgggaagacaatagcaggcatgctggggatgcggtgggctctatggatcccctaactacaaggaacccctagtgatggagttggccactccctctctgcgcgctcgctcgctcactgaggccgggcgaccaaaggtcgcccgacgcccgggctttgcccgggcggcctcagtgagcgagcgagcgcgcagagagggagtggccaacaggaagctcctctgtgtcctcataaaccctaacctcctctacttgagaggacattccaatcataggctgcccatccaccctctgtgtcctcctgttaattaggtcacttaacaaaaaggaaattgggtaggggtttttcacagaccgctttctaagggtaattttaaaatatctgggaagtcccttccactgctgtgttccagaagtgttggtaaacagcccacaaatgtcaacagcagaaacatacaagctgtcagctttgcacaagggcccaatctctggaagatccgcgcgtaccgagttctaattcactggccgtcgttttacaacgtcgtgactgggaaaaccctggcgttacccaacttaatcgccttgcagcacatccccctttcgccagctggcgtaatagcgaagaggcccgcaccgatcgcccttcccaacagttgcgcagcctgaatggcgaatggcgcctgatgcggtattttctccttacgcatctgtgcggtatttcacaccgcatatggtgcactctcagtacaatctgctctgatgccgcatagttaagccagccccgacacccgccaacacccgctgacgcgccctgacgggcttgtctgctcccggcatccgcttacagacaagctgtgaccgtctccgggagctgcatgtgtcagaggttttcaccgtcatcaccgaaacgcgcgagacgaaagggcctcgtgatacgcctatttttataggttaatgtcatgataataatggtttcttagacgtcaggtggcacttttcggggaaatgtgcgcggaacccccatttgtttatttttctaaatacattcaaatatgtatccgctcatgagacaataaccctgataaatgcttcaataatattgaaaaaggaagagtatgagccatattcaacgggaaacgtcttgctctaggccgcgattaaattccaacatggatgctgatttatatgggtataaatgggctcgcgataatgtcgggcaatcaggtgcgacaatctatcgattgtatgggaagcccgatgcgccagagttgtttctgaaacatggcaaaggtagcgttgccaatgatgttacagatgagatggtcagactaaactggctgacggaatttatgcctcttccgaccatcaagcattttatccgtactcctgatgatgcatggttactcaccactgcgatccctgggaaaacagcattccaggtattagaagaatatcctgattcaggtgaaaatattgttgatgcgctggcagtgttcctgcgccggttgcattcgattcctgtttgtaattgtccttttaacagcgatcgcgtatttcgtctcgctcaggcgcaatcacgaatgaataacggtttggttgatgcgagtgattttgatgacgagcgtaatggctggcctgttgaacaagtctggaaagaaatgcataaacttttgccattctcaccggattcagtcgtcactcatggtgatttctcacttgataaccttatttttgacgaggggaaattaataggttgtattgatgttggacgagtcggaatcgcagaccgataccaggatcttgccatcctatggaactgcctcggtgagttttctccttcattacagaaacggctttttcaaaaatatggtattgataatcctgatatgaataaattgcagtttcatttgatgctcgatgagtttttctaaaagcttgtgcaatgccacaaagaagagtcaatcgcagacaacattttgaatgcggtcacacgttagcagcatgattgccacggatggcaacatattaacggcatgatattgacttattgaataaaattgggtaaatttgactcaacgatgggttaattcgctcgttgtggtagtgagatgaaaagaggcggcgcttactaccgattccgcctagttggtcacttcgacgtatcgtctggaactccaaccatcgcaggcagagaggtctgcaaaatgcaatcccgaaacagttcgcaggtaatagttagagcctgcataacggtttcgggattttttatatctgcacaacaggtaagagcattgagtcgataatcgtgaagagtcggcgagcctggttagccagtgctctttccgttgtgctgaattaagcgaataccggaagcagaaccggatcaccaaatgcgtacaggcgtcatcgccgcccagcaacagcacaacccaaactgagccgtagccactgtctgtcctgaattcattagtaatagttacgctgcggccttttacacatgaccttcgtgaaagcgggtggcaggaggtcgcgctaacaacctcctgccgttttgcccgtgcatatcggtcacgaacaaatctgattactaaacacagtagcctggatttgttctatcagtaatcgaccttattcctaattaaatagagcaaatccccttattgggggtaagacatgaagatgccagaaaaacatgacctgttggccgccattctcgcggcaaaggaacaaggcatcggggcaatccttgcgtttgcaatggcgtaccttcgcggcagatataatggcggtgcgtttacaaaaacagtaatcgacgcaacgatgtgcgccattatcgcctggttcattcgtgaccttctcgacttcgccggactaagtagcaatctcgcttatataacgagcgtgtttatcggctacatcggtactgactcgattggttcgcttatcaaacgcttcgctgctaaaaaagccggagtagaagatggtagaaatcaataatcaacgtaaggcgttcctcgatatgctggcgtggtcggagggaactgataacggacgtcagaaaaccagaaatcatggttatgacgtcattgtaggcggagagctatttactgattactccgatcaccctcgcaaacttgtcacgctaaacccaaaactcaaatcaacaggcgccggacgctaccagcttctttcccgttggtgggatgcctaccgcaagcagcttggcctgaaagacttctctccgaaaagtcaggacgctgtggcattgcagcagattaaggagcgtggcgctttacctatgattgatcgtggtgatatccgtcaggcaatcgaccgttgcagcaatatctgggcttcactgccgggcgctggttatggtcagttcgagcataaggctgacagcctgattgcaaaattcaaagaagcgggcggaacggtcagagagattgatgtatgagcagagtcaccgcgattatctccgctctggttatctgcatcatcgtctgcctgtcatgggctgttaatcattaccgtgataacgccattacctacaaagcccagcgcgacaaaaatgccagagaactgaagctggcgaacgcggcaattactgacatgcagatgcgtcagcgtgatgttgctgcgctcgatgcaaaatacacgaaggagttagctgatgctaaagctgaaaatgatgctctgcgtgatgatgttgccgctggtcgtcgtcggttgcacatcaaagcagtctgtcagtcagtgcgtgaagccaccaccgcctccggcgtggataatgcagcctccccccgactggcagacaccgctgaacgggattatttcaccctcagagagaggctgatcactatgcaaaaacaactggaaggaacccagaagtatattaatgagcagtgcagatagagttgcccatatcgatgggcaactcatgcaattattgtgagcaatacacacgcgcttccagcggagtataaatgcctaaagtaataaaaccgagcaatccatttacgaatgtttgctgggtttctgttttaacaacattttctgcgccgccacaaattttggctgcatcgacagttttcttctgcccaattccagaaacgaagaaatgatgggtgatggtttcctttggtgctactgctgccggtttgttttgaacagtaaacgtctgttgagcacatcctgtaataagcagggccagcgcagtagcgagtagcatttttttcatggtgttattcccgatgctttttgaagttcgcagaatcgtatgtgtagaaaattaaacaaaccctaaacaatgagttgaaatttcatattgttaatatttattaatgtatgtcaggtgcgatgaatcgtcattgtattcccggattaactatgtccacagccctgacggggaacttctctgcgggagtgtccgggaataattaaaacgatgcacacagggtttagcgcgtacacgtattgcattatgccaacgccccggtgctgacacggaagaaaccggacgttatgatttagcgtggaaagatttgtgtagtgttctgaatgctctcagtaaatagtaatgaattatcaaaggtatagtaatatcttttatgttcatggatatttgtaacccatcggaaaactcctgctttagcaagattttccctgtattgctgaaatgtgatttctcttgatttcaacctatcataggacgtttctataagatgcgtgtttcttgagaatttaacatttacaacctttttaagtccttttattaacacggtgttatcgttttctaacacgatgtgaatattatctgtggctagatagtaaatataatgtgagacgttgtgacgtttgctagcctgtcagaccaagtttactcatatatactttagattgatttaaaacttcatttttaatttaaaaggatctaggtgaagatcctttttgataatctcatgaccaaaatcccttaacgtgagttttcgttccactgagcgtcagaccccgtagaaaagatcaaaggatcttcttgagatcctttttttctgcgcgtaatctgctgcttgcaaacaaaaaaaccaccgctaccagcggtggtttgtttgccggatcaagagctaccaactctttttccgaaggtaactggcttcagcagagcgcagataccaaatactgttcttctagtgtagccgtagttaggccaccacttcaagaactctgtagcaccgcctacatacctcgctctgctaatcctgttaccagtggctgctgccagtggcgataagtcgtgtcttaccgggttggactcaagacgatagttaccggataaggcgcagcggtcgggctgaacggggggttcgtgcacacagcccagcttggagcgaacgacctacaccgaactgagatacctacagcgtgagctatgagaaagcgccacgcttcccgaagggagaaaggcggacaggtatccggtaagcggcagggtcggaacaggagagcgcacgagggagcttccagggggaaacgcctggtatctttatagtcctgtcgggtttcgccacctctgacttgagcgtcgatttttgtgatgctcgtcaggggggcggagcctatggaaaaacgccagcaacgcggcctttttacggttcctggccttttgctggccttttgctcacatgttctttcctgcgttatcccctgattctgtggataaccgtattaccgcctttgagtgagctgataccgctcgccgcagccgaacgaccgagcgcagcgagtcagtgagcgaggaagcggaagagcgcccaatacgcaaaccgcctctccccgcgcgttggccgattcattaatgcagctggcacgacaggtttcccgactggaaagcgggcagtgagcgcaacgcaattaatgtgagttagctcactcattaggcaccccaggctttacactttatgcttccggctcgtatgttgtgtggaattgtgagcggataacaatttcacacaggaaacagctatgaccatgattacgccaagtttgcacgcctgccgttcgacgatttcgcgagttggttcagctgctgcctgaggctggacgacctcgcggagttctaccggcagtgcaaatccgtcggcatccaggaaaccagcagcggctatccgcgcatccatgcccccgaactgcaggagtggggaggcacgatggccgctttggtccggatctttgtgaaggaaccttacttctgtggtgtgacataattggacaaactacctacagagatttaaagctctaaggtaaatataaaatttttaagtgtataatgtgttaaactactgattctaattgtttgtgtattttagattccaacctatggaactgatgaatgggagcagtggtggaatgcctttaatgaggaaaacctgttttgctcagaagaaatgccatctagtgatgatgaggctactgctgactctcaacattctactcctccaaaaaagaagagaaaggtagaagaccccaaggactttccttcagaattgctaagttttttgagtcatgctgtgtttagtaatagaactcttgcttgctttgctatttacaccacaaaggaaaaagctgcactgctatacaagaaaattatggaaaaatattctgtaacctttataagtaggcataacagttataatcataacatactgttttttcttactccacacaggcatagagtgt

SEQ ID NO: 100 - DNA, 9651 bp, synthetic construct
  source 1..9651: mol_type = other DNA
ctgctattaataactatgctcaaaaattgtgtacctttagctttttaatttgtaaaggggttaataaggaatatttgatgtatagtgccttgactagagatcataatcagccataccacatttgtagaggttttacttgctttaaaaaacctcccacacctccccctgaacctgaaacataaaatgaatgcaattgttgttgttctagcttggccactccctctctgcgcgctcgctcgctcactgaggccgggcgaccaaaggtcgcccgacgcccgggctttgcccgggcggcctcagtgagcgagcgagcgcgcagagagggagtggccaactccatcactaggggttcctctcgaggcggccgcaggctcagaggcacacaggagtttctgggctcaccctgcccccttccaacccctcagttcccatcctccagcagctgtttgtgtgctgcctctgaagtccacactgaacaaacttcagcctactcatgtccctaaaatgggcaaacattgcaagcagcaaacagcaaacacacagccctccctgcctgctgaccttggagctggggcagaggtcagagacctctctgggcccatgccacctccaacatccactcgaccccttggaatttcggtggagaggagcagaggttgtcctggcgtggtttaggtagtgtgagaggggtcgacgatcttgctaccagtggaacagccactaaggattctgcagtgagagcagagggccagctaagtggtactctcccagagactgtctgactcacgccaccccctccaccttggacacaggacgctgtggtttctgagccaggtacaatgactcctttcggtaagtgcagtggaagctgtacactgcccaggcaaagcgtccgggcagcgtaggcgggcgactcagatcccagccagtggacttagcccctgtttgctcctccgataactggggtgaccttggttaatattcaccagcagcctcccccgttgcccctctggatccactgcttaaatacggacgaggacagggccctgtctcctcagcttcaggcaccaccactgacctgggacagtgaatcgtaagtatgcctttcactgcgagaggttctggagaggcttctgagctccccatggcccaggcaggcagcaggtctggggcaggaggggggttgtggagtgggtatccgcctgctgaggtgcagggcagatcatcatgtgccttgactcggggcctggcccccccatctctgtcttgcaggacaattgccgtcttctgtctcgtggggcatcctcctgctggcaggcctgtgctgcctggtccctgtctccctggctgaggaccgggtaccgccaccatgagcacagctgtgctggaaaaccctggcttaggcagaaagctgtctgactttggccaagagaccagctacattgaggataactgcaaccagaatggagccatctctctgatcttcagcttgaaggaggaagtgggagccctagccaaggtgctgagactgtttgaggagaatgatgtgaatctgacccacattgaaagcagacctagcagactgaagaaggatgaatatgaattcttcacccacctggacaaaagaagcctaccagccctgaccaacatcatcaagatcctgaggcatgacataggagccacagtgcatgagctgtccagggacaaaaaaaaggacacagtgccttggttccccagaacaatccaggagctggacagatttgccaaccaaatcctcagctatggagctgaactggatgctgaccaccctggcttcaaggacccagtgtacagggccagaagaaagcagtttgctgacatagcctacaactacaggcatggccaacctatccctagggtggagtacatggaggaagaaaagaagacctggggcacagtgttcaagaccctgaaaagcctgtacaagacccatgcctgctatgaatacaaccacatcttccctctgctggagaagtactgtggcttccatgaagacaacatccctcagctggaggatgtgagccagttcctgcagacctgcacaggcttcagactgaggccagtggctggcctgctgagcagcagagacttcctggggggcctggccttcagagtgttccactgcacccagtacatcagacacggcagcaagcctatgtacacccctgaacctgacatctgccatgagctcctgggccatgtgcccctgttctctgatagatcctttgcccagttcagccaggaaattggcctggccagcctgggtgcccctgatgaatacattgaaaagctggcaaccatctactggttcacagttgagtttggcctgtgtaaacagggagacagcatcaaggcctatggagcaggcctgctgtccagctttggagagctgcagtactgtctgagtgagaaacctaagctgctgcccctggagctggagaagacagccatccagaactacacagtgactgagttccagcccctgtactatgttgctgagagcttcaatgatgccaaggagaaggtgagaaactttgcagccaccatccccagacccttctcagtcagatatgacccttacacccagagaattgaggtgcttgacaacacccagcagctgaagatcctggctgactctatcaactctgaaattggcatcctctgctctgccttgcagaaaatcaagtgaagatctgcctcgactgtgccttctagttgccagccatctgttgtttgcccctcccccgtgccttccttgaccctggaaggtgccactcccactgtcctttcctaataaaatgaggaaattgcatcgcattgtctgagtaggtgtcattctattctggggggtggggtggggcaggacagcaagggggaggattgggaagacaatagcaggcatgctggggatgcggtgggctctatggatcccctaactacaaggaacccctagtgatggagttggccactccctctctgcgcgctcgctcgctcactgaggccgggcgaccaaaggtcgcccgacgcccgggctttgcccgggcggcctcagtgagcgagcgagcgcgcagagagggagtggccaacaggaagctcctctgtgtcctcataaaccctaacctcctctacttgagaggacattccaatcataggctgcccatccaccctctgtgtcctcctgttaattaggtcacttaacaaaaaggaaattgggtaggggtttttcacagaccgctttctaagggtaattttaaaatatctgggaagtcccttccactgctgtgttccagaagtgttggtaaacagcccacaaatgtcaacagcagaaacatacaagctgtcagctttgcacaagggcccaatctctggaagatccgcgcgtaccgagttctaattcactggccgtcgttttacaacgtcgtgactgggaaaaccctggcgttacccaacttaatcgccttgcagcacatccccctttcgccagctggcgtaatagcgaagaggcccgcaccgatcgcccttcccaacagttgcgcagcctgaatggcgaatggcgcctgatgcggtattttctccttacgcatctgtgcggtatttcacaccgcatatggtgcactctcagtacaatctgctctgatgccgcatagttaagccagccccgacacccgccaacacccgctgacgcgccctgacgggcttgtctgctcccggcatccgcttacagacaagctgtgaccgtctccgggagctgcatgtgtcagaggttttcaccgtcatcaccgaaacgcgcgagacgaaagggcctcgtgatacgcctatttttataggttaatgtcatgataataatggtttcttagacgtcaggtggcacttttcggggaaatgtgcgcggaacccccatttgtttatttttctaaatacattcaaatatgtatccgctcatgagacaataaccctgataaatgcttcaataatattgaaaaaggaagagtatgagccatattcaacgggaaacgtcttgctctaggccgcgattaaattccaacatggatgctgatttatatgggtataaatgggctcgcgataatgtcgggcaatcaggtgcgacaatctatcgattgtatgggaagcccgatgcgccagagttgtttctgaaacatggcaaaggtagcgttgccaatgatgttacagatgagatggtcagactaaactggctgacggaatttatgcctcttccgaccatcaagcattttatccgtactcctgatgatgcatggttactcaccactgcgatccctgggaaaacagcattccaggtattagaagaatatcctgattcaggtgaaaatattgttgatgcgctggcagtgttcctgcgccggttgcattcgattcctgtttgtaattgtccttttaacagcgatcgcgtatttcgtctcgctcaggcgcaatcacgaatgaataacggtttggttgatgcgagtgattttgatgacgagcgtaatggctggcctgttgaacaagtctggaaagaaatgcataaacttttgccattctcaccggattcagtcgtcactcatggtgatttctcacttgataaccttatttttgacgaggggaaattaataggttgtattgatgttggacgagtcggaatcgcagaccgataccaggatcttgccatcctatggaactgcctcggtgagttttctccttcattacagaaacggctttttcaaaaatatggtattgataatcctgatatgaataaattgcagtttcatttgatgctcgatgagtttttctaaaagcttgtgcaatgccacaaagaagagtcaatcgcagacaacattttgaatgcggtcacacgttagcagcatgattgccacggatggcaacatattaacggcatgatattgacttattgaataaaattgggtaaatttgactcaacgatgggttaattcgctcgttgtggtagtgagatgaaaagaggcggcgcttactaccgattccgcctagttggtcacttcgacgtatcgtctggaactccaaccatcgcaggcagagaggtctgcaaaatgcaatcccgaaacagttcgcaggtaatagttagagcctgcataacggtttcgggattttttatatctgcacaacaggtaagagcattgagtcgataatcgtgaagagtcggcgagcctggttagccagtgctctttccgttgtgctgaattaagcgaataccggaagcagaaccggatcaccaaatgcgtacaggcgtcatcgccgcccagcaacagcacaacccaaactgagccgtagccactgtctgtcctgaattcattagtaatagttacgctgcggccttttacacatgaccttcgtgaaagcgggtggcaggaggtcgcgctaacaacctcctgccgttttgcccgtgcatatcggtcacgaacaaatctgattactaaacacagtagcctggatttgttctatcagtaatcgaccttattcctaattaaatagagcaaatccccttattgggggtaagacatgaagatgccagaaaaacatgacctgttggccgccattctcgcggcaaaggaacaaggcatcggggcaatccttgcgtttgcaatggcgtaccttcgcggcagatataatggcggtgcgtttacaaaaacagtaatcgacgcaacgatgtgcgccattatcgcctggttcattcgtgaccttctcgacttcgccggactaagtagcaatctcgcttatataacgagcgtgtttatcggctacatcggtactgactcgattggttcgcttatcaaacgcttcgctgctaaaaaagccggagtagaagatggtagaaatcaataatcaacgtaaggcgttcctcgatatgctggcgtggtcggagggaactgataacggacgtcagaaaaccagaaatcatggttatgacgtcattgtaggcggagagctatttactgattactccgatcaccctcgcaaacttgtcacgctaaacccaaaactcaaatcaacaggcgccggacgctaccagcttctttcccgttggtgggatgcctaccgcaagcagcttggcctgaaagacttctctccgaaaagtcaggacgctgtggcattgcagcagattaaggagcgtggcgctttacctatgattgatcgtggtgatatccgtcaggcaatcgaccgttgcagcaatatctgggcttcactgccgggcgctggttatggtcagttcgagcataaggctgacagcctgattgcaaaattcaaagaagcgggcggaacggtcagagagattgatgtatgagcagagtcaccgcgattatctccgctctggttatctgcatcatcgtctgcctgtcatgggctgttaatcattaccgtgataacgccattacctacaaagcccagcgcgacaaaaatgccagagaactgaagctggcgaacgcggcaattactgacatgcagatgcgtcagcgtgatgttgctgcgctcgatgcaaaatacacgaaggagttagctgatgctaaagctgaaaatgatgctctgcgtgatgatgttgccgctggtcgtcgtcggttgcacatcaaagcagtctgtcagtcagtgcgtgaagccaccaccgcctccggcgtggataatgcagcctccccccgactggcagacaccgctgaacgggattatttcaccctcagagagaggctgatcactatgcaaaaacaactggaaggaacccagaagtatattaatgagcagtgcagatagagttgcccatatcgatgggcaactcatgcaattattgtgagcaatacacacgcgcttccagcggagtataaatgcctaaagtaataaaaccgagcaatccatttacgaatgtttgctgggtttctgttttaacaacattttctgcgccgccacaaattttggctgcatcgacagttttcttctgcccaattccagaaacgaagaaatgatgggtgatggtttcctttggtgctactgctgccggtttgttttgaacagtaaacgtctgttgagcacatcctgtaataagcagggccagcgcagtagcgagtagcatttttttcatggtgttattcccgatgctttttgaagttcgcagaatcgtatgtgtagaaaattaaacaaaccctaaacaatgagttgaaatttcatattgttaatatttattaatgtatgtcaggtgcgatgaatcgtcattgtattcccggattaactatgtccacagccctgacggggaacttctctgcgggagtgtccgggaataattaaaacgatgcacacagggtttagcgcgtacacgtattgcattatgccaacgccccggtgctgacacggaagaaaccggacgttatgatttagcgtggaaagatttgtgtagtgttctgaatgctctcagtaaatagtaatgaattatcaaaggtatagtaatatcttttatgttcatggatatttgtaacccatcggaaaactcctgctttagcaagattttccctgtattgctgaaatgtgatttctcttgatttcaacctatcataggacgtttctataagatgcgtgtttcttgagaatttaacatttacaacctttttaagtccttttattaacacggtgttatcgttttctaacacgatgtgaatattatctgtggctagatagtaaatataatgtgagacgttgtgacgtttgctagcctgtcagaccaagtttactcatatatactttagattgatttaaaacttcatttttaatttaaaaggatctaggtgaagatcctttttgataatctcatgaccaaaatcccttaacgtgagttttcgttccactgagcgtcagaccccgtagaaaagatcaaaggatcttcttgagatcctttttttctgcgcgtaatctgctgcttgcaaacaaaaaaaccaccgctaccagcggtggtttgtttgccggatcaagagctaccaactctttttccgaaggtaactggcttcagcagagcgcagataccaaatactgttcttctagtgtagccgtagttaggccaccacttcaagaactctgtagcaccgcctacatacctcgctctgctaatcctgttaccagtggctgctgccagtggcgataagtcgtgtcttaccgggttggactcaagacgatagttaccggataaggcgcagcggtcgggctgaacggggggttcgtgcacacagcccagcttggagcgaacgacctacaccgaactgagatacctacagcgtgagctatgagaaagcgccacgcttcccgaagggagaaaggcggacaggtatccggtaagcggcagggtcggaacaggagagcgcacgagggagcttccagggggaaacgcctggtatctttatagtcctgtcgggtttcgccacctctgacttgagcgtcgatttttgtgatgctcgtcaggggggcggagcctatggaaaaacgccagcaacgcggcctttttacggttcctggccttttgctggccttttgctcacatgttctttcctgcgttatcccctgattctgtggataaccgtattaccgcctttgagtgagctgataccgctcgccgcagccgaacgaccgagcgcagcgagtcagtgagcgaggaagcggaagagcgcccaatacgcaaaccgcctctccccgcgcgttggccgattcattaatgcagctggcacgacaggtttcccgactggaaagcgggcagtgagcgcaacgcaattaatgtgagttagctcactcattaggcaccccaggctttacactttatgcttccggctcgtatgttgtgtggaattgtgagcggataacaatttcacacaggaaacagctatgaccatgattacgccaagtttgcacgcctgccgttcgacgatttcgcgagttggttcagctgctgcctgaggctggacgacctcgcggagttctaccggcagtgcaaatccgtcggcatccaggaaaccagcagcggctatccgcgcatccatgcccccgaactgcaggagtggggaggcacgatggccgctttggtccggatctttgtgaaggaaccttacttctgtggtgtgacataattggacaaactacctacagagatttaaagctctaaggtaaatataaaatttttaagtgtataatgtgttaaactactgattctaattgtttgtgtattttagattccaacctatggaactgatgaatgggagcagtggtggaatgcctttaatgaggaaaacctgttttgctcagaagaaatgccatctagtgatgatgaggctactgctgactctcaacattctactcctccaaaaaagaagagaaaggtagaagaccccaaggactttccttcagaattgctaagttttttgagtcatgctgtgtttagtaatagaactcttgcttgctttgctatttacaccacaaaggaaaaagctgcactgctatacaagaaaattatggaaaaatattctgtaacctttataagtaggcataacagttataatcataacatactgttttttcttactccacacaggcatagagtgt

SEQ ID NO: 101 - DNA, 9651 bp, synthetic construct
  source 1..9651: mol_type = other DNA
ctgctattaataactatgctcaaaaattgtgtacctttagctttttaatttgtaaaggggttaataaggaatatttgatgtatagtgccttgactagagatcataatcagccataccacatttgtagaggttttacttgctttaaaaaacctcccacacctccccctgaacctgaaacataaaatgaatgcaattgttgttgttctagcttggccactccctctctgcgcgctcgctcgctcactgaggccgggcgaccaaaggtcgcccgacgcccgggctttgcccgggcggcctcagtgagcgagcgagcgcgcagagagggagtggccaactccatcactaggggttcctctcgaggcggccgcaggctcagaggcacacaggagtttctgggctcaccctgcccccttccaacccctcagttcccatcctccagcagctgtttgtgtgctgcctctgaagtccacactgaacaaacttcagcctactcatgtccctaaaatgggcaaacattgcaagcagcaaacagcaaacacacagccctccctgcctgctgaccttggagctggggcagaggtcagagacctctctgggcccatgccacctccaacatccactcgaccccttggaatttcggtggagaggagcagaggttgtcctggcgtggtttaggtagtgtgagaggggtcgacgatcttgctaccagtggaacagccactaaggattctgcagtgagagcagagggccagctaagtggtactctcccagagactgtctgactcacgccaccccctccaccttggacacaggacgctgtggtttctgagccaggtacaatgactcctttcggtaagtgcagtggaagctgtacactgcccaggcaaagcgtccgggcagcgtaggcgggcgactcagatcccagccagtggacttagcccctgtttgctcctccgataactggggtgaccttggttaatattcaccagcagcctcccccgttgcccctctggatccactgcttaaatacggacgaggacagggccctgtctcctcagcttcaggcaccaccactgacctgggacagtgaatcgtaagtatgcctttcactgcgagaggttctggagaggcttctgagctccccatggcccaggcaggcagcaggtctggggcaggaggggggttgtggagtgggtatccgcctgctgaggtgcagggcagatcatcatgtgccttgactcggggcctggcccccccatctctgtcttgcaggacaattgccgtcttctgtctcgtggggcatcctcctgctggcaggcctgtgctgcctggtccctgtctccctggctgaggaccgggtaccgccaccatgagcacagcagtgctggagaaccctggcctgggcaggaaattgtctgactttggccaggaaacctcctacattgaggacaactgtaaccagaatggagccatcagcctgatcttcagcctgaaagaggaggtgggggccctggccaaggtgctgagactgtttgaggaaaatgatgtcaacctgacccacattgagtccagacccagcagactgaagaaagatgaatatgagttcttcacacacctggacaagagaagcctgcctgccctgaccaacatcatcaagatcctgagacatgacataggagccacagtgcatgagctgagcagggacaagaagaaggacacagtgccctggttcccaagaaccatccaggaactggatagatttgccaaccagatcctgagctatggagctgagctggatgctgaccacccaggcttcaaggaccctgtgtacagagccagaaggaagcagtttgctgacatagcctacaactacagacacggccagcctatccccagagtggaatacatggaagaggagaagaagacctggggcactgtgttcaagacccttaagtctctgtacaagacccatgcctgctatgaatacaaccacatcttccctctgctggagaagtactgtggcttccatgaagacaatatcccccagctggaggatgtgagccagttcctgcaaacctgcactggcttcagactgagacctgtggcaggcctgctgagcagcagagacttcctgggtggcctggccttcagagtcttccactgtacccagtacatcaggcatggcagcaagcccatgtacactccagagcctgacatctgccacgagctgctgggccatgtgcctctgttctcagacagaagctttgcccagttcagccaggagattggcttagcctccttaggagcccctgatgaatacatagaaaaactggccaccatctactggttcacagtggagtttggcctgtgcaagcaaggtgacagcatcaaagcctatggagctggcctgctgagctcctttggagaacttcagtactgcctctctgagaagcctaaactgctgcctctggagctggagaagacagccatccagaactacacagtgacagaattccaacctctgtactatgttgctgagagcttcaatgatgccaaagagaaggtgagaaactttgctgccaccatccccagacccttctctgtgaggtatgacccttacacccagagaattgaagtgctggacaacacccagcagctgaagatcctggctgacagcatcaactctgagataggcatcctgtgctctgccctgcaaaagatcaagtgaagatctgcctcgactgtgccttctagttgccagccatctgttgtttgcccctcccccgtgccttccttgaccctggaaggtgccactcccactgtcctttcctaataaaatgaggaaattgcatcgcattgtctgagtaggtgtcattctattctggggggtggggtggggcaggacagcaagggggaggattgggaagacaatagcaggcatgctggggatgcggtgggctctatggatcccctaactacaaggaacccctagtgatggagttggccactccctctctgcgcgctcgctcgctcactgaggccgggcgaccaaaggtcgcccgacgcccgggctttgcccgggcggcctcagtgagcgagcgagcgcgcagagagggagtggccaacaggaagctcctctgtgtcctcataaaccctaacctcctctacttgagaggacattccaatcataggctgcccatccaccctctgtgtcctcctgttaattaggtcacttaacaaaaaggaaattgggtaggggtttttcacagaccgctttctaagggtaattttaaaatatctgggaagtcccttccactgctgtgttccagaagtgttggtaaacagcccacaaatgtcaacagcagaaacatacaagctgtcagctttgcacaagggcccaatctctggaagatccgcgcgtaccgagttctaattcactggccgtcgttttacaacgtcgtgactgggaaaaccctggcgttacccaacttaatcgccttgcagcacatccccctttcgccagctggcgtaatagcgaagaggcccgcaccgatcgcccttcccaacagttgcgcagcctgaatggcgaatggcgcctgatgcggtattttctccttacgcatctgtgcggtatttcacaccgcatatggtgcactctcagtacaatctgctctgatgccgcatagttaagccagccccgacacccgccaacacccgctgacgcgccctgacgggcttgtctgctcccggcatccgcttacagacaagctgtgaccgtctccgggagctgcatgtgtcagaggttttcaccgtcatcaccgaaacgcgcgagacgaaagggcctcgtgatacgcctatttttataggttaatgtcatgataataatggtttcttagacgtcaggtggcacttttcggggaaatgtgcgcggaacccccatttgtttatttttctaaatacattcaaatatgtatccgctcatgagacaataaccctgataaatgcttcaataatattgaaaaaggaagagtatgagccatattcaacgggaaacgtcttgctctaggccgcgattaaattccaacatggatgctgatttatatgggtataaatgggctcgcgataatgtcgggcaatcaggtgcgacaatctatcgattgtatgggaagcccgatgcgccagagttgtttctgaaacatggcaaaggtagcgttgccaatgatgttacagatgagatggtcagactaaactggctgacggaatttatgcctcttccgaccatcaagcattttatccgtactcctgatgatgcatggttactcaccactgcgatccctgggaaaacagcattccaggtattagaagaatatcctgattcaggtgaaaatattgttgatgcgctggcagtgttcctgcgccggttgcattcgattcctgtttgtaattgtccttttaacagcgatcgcgtatttcgtctcgctcaggcgcaatcacgaatgaataacggtttggttgatgcgagtgattttgatgacgagcgtaatggctggcctgttgaacaagtctggaaagaaatgcataaacttttgccattctcaccggattcagtcgtcactcatggtgatttctcacttgataaccttatttttgacgaggggaaattaataggttgtattgatgttggacgagtcggaatcgcagaccgataccaggatcttgccatcctatggaactgcctcggtgagttttctccttcattacagaaacggctttttcaaaaatatggtattgataatcctgatatgaataaattgcagtttcatttgatgctcgatgagtttttctaaaagcttgtgcaatgccacaaagaagagtcaatcgcagacaacattttgaatgcggtcacacgttagcagcatgattgccacggatggcaacatattaacggcatgatattgacttattgaataaaattgggtaaatttgactcaacgatgggttaattcgctcgttgtggtagtgagatgaaaagaggcggcgcttactaccgattccgcctagttggtcacttcgacgtatcgtctggaactccaaccatcgcaggcagagaggtctgcaaaatgcaatcccgaaacagttcgcaggtaatagttagagcctgcataacggtttcgggattttttatatctgcacaacaggtaagagcattgagtcgataatcgtgaagagtcggcgagcctggttagccagtgctctttccgttgtgctgaattaagcgaataccggaagcagaaccggatcaccaaatgcgtacaggcgtcatcgccgcccagcaacagcacaacccaaactgagccgtagccactgtctgtcctgaattcattagtaatagttacgctgcggccttttacacatgaccttcgtgaaagcgggtggcaggaggtcgcgctaacaacctcctgccgttttgcccgtgcatatcggtcacgaacaaatctgattactaaacacagtagcctggatttgttctatcagtaatcgaccttattcctaattaaatagagcaaatccccttattgggggtaagacatgaagatgccagaaaaacatgacctgttggccgccattctcgcggcaaaggaacaaggcatcggggcaatccttgcgtttgcaatggcgtaccttcgcggcagatataatggcggtgcgtttacaaaaacagtaatcgacgcaacgatgtgcgccattatcgcctggttcattcgtgaccttctcgacttcgccggactaagtagcaatctcgcttatataacgagcgtgtttatcggctacatcggtactgactcgattggttcgcttatcaaacgcttcgctgctaaaaaagccggagtagaagatggtagaaatcaataatcaacgtaaggcgttcctcgatatgctggcgtggtcggagggaactgataacggacgtcagaaaaccagaaatcatggttatgacgtcattgtaggcggagagctatttactgattactccgatcaccctcgcaaacttgtcacgctaaacccaaaactcaaatcaacaggcgccggacgctaccagcttctttcccgttggtgggatgcctaccgcaagcagcttggcctgaaagacttctctccgaaaagtcaggacgctgtggcattgcagcagattaaggagcgtggcgctttacctatgattgatcgtggtgatatccgtcaggcaatcgaccgttgcagcaatatctgggcttcactgccgggcgctggttatggtcagttcgagcataaggctgacagcctgattgcaaaattcaaagaagcgggcggaacggtcagagagattgatgtatgagcagagtcaccgcgattatctccgctctggttatctgcatcatcgtctgcctgtcatgggctgttaatcattaccgtgataacgccattacctacaaagcccagcgcgacaaaaatgccagagaactgaagctggcgaacgcggcaattactgacatgcagatgcgtcagcgtgatgttgctgcgctcgatgcaaaatacacgaaggagttagctgatgctaaagctgaaaatgatgctctgcgtgatgatgttgccgctggtcgtcgtcggttgcacatcaaagcagtctgtcagtcagtgcgtgaagccaccaccgcctccggcgtggataatgcagcctccccccgactggcagacaccgctgaacgggattatttcaccctcagagagaggctgatcactatgcaaaaacaactggaaggaacccagaagtatattaatgagcagtgcagatagagttgcccatatcgatgggcaactcatgcaattattgtgagcaatacacacgcgcttccagcggagtataaatgcctaaagtaataaaaccgagcaatccatttacgaatgtttgctgggtttctgttttaacaacattttctgcgccgccacaaattttggctgcatcgacagttttcttctgcccaattccagaaacgaagaaatgatgggtgatggtttcctttggtgctactgctgccggtttgttttgaacagtaaacgtctgttgagcacatcctgtaataagcagggccagcgcagtagcgagtagcatttttttcatggtgttattcccgatgctttttgaagttcgcagaatcgtatgtgtagaaaattaaacaaaccctaaacaatgagttgaaatttcatattgttaatatttattaatgtatgtcaggtgcgatgaatcgtcattgtattcccggattaactatgtccacagccctgacggggaacttctctgcgggagtgtccgggaataattaaaacgatgcacacagggtttagcgcgtacacgtattgcattatgccaacgccccggtgctgacacggaagaaaccggacgttatgatttagcgtggaaagatttgtgtagtgttctgaatgctctcagtaaatagtaatgaattatcaaaggtatagtaatatcttttatgttcatggatatttgtaacccatcggaaaactcctgctttagcaagattttccctgtattgctgaaatgtgatttctcttgatttcaacctatcataggacgtttctataagatgcgtgtttcttgagaatttaacatttacaacctttttaagtccttttattaacacggtgttatcgttttctaacacgatgtgaatattatctgtggctagatagtaaatataatgtgagacgttgtgacgtttgctagcctgtcagaccaagtttactcatatatactttagattgatttaaaacttcatttttaatttaaaaggatctaggtgaagatcctttttgataatctcatgaccaaaatcccttaacgtgagttttcgttccactgagcgtcagaccccgtagaaaagatcaaaggatcttcttgagatcctttttttctgcgcgtaatctgctgcttgcaaacaaaaaaaccaccgctaccagcggtggtttgtttgccggatcaagagctaccaactctttttccgaaggtaactggcttcagcagagcgcagataccaaatactgttcttctagtgtagccgtagttaggccaccacttcaagaactctgtagcaccgcctacatacctcgctctgctaatcctgttaccagtggctgctgccagtggcgataagtcgtgtcttaccgggttggactcaagacgatagttaccggataaggcgcagcggtcgggctgaacggggggttcgtgcacacagcccagcttggagcgaacgacctacaccgaactgagatacctacagcgtgagctatgagaaagcgccacgcttcccgaagggagaaaggcggacaggtatccggtaagcggcagggtcggaacaggagagcgcacgagggagcttccagggggaaacgcctggtatctttatagtcctgtcgggtttcgccacctctgacttgagcgtcgatttttgtgatgctcgtcaggggggcggagcctatggaaaaacgccagcaacgcggcctttttacggttcctggccttttgctggccttttgctcacatgttctttcctgcgttatcccctgattctgtggataaccgtattaccgcctttgagtgagctgataccgctcgccgcagccgaacgaccgagcgcagcgagtcagtgagcgaggaagcggaagagcgcccaatacgcaaaccgcctctccccgcgcgttggccgattcattaatgcagctggcacgacaggtttcccgactggaaagcgggcagtgagcgcaacgcaattaatgtgagttagctcactcattaggcaccccaggctttacactttatgcttccggctcgtatgttgtgtggaattgtgagcggataacaatttcacacaggaaacagctatgaccatgattacgccaagtttgcacgcctgccgttcgacgatttcgcgagttggttcagctgctgcctgaggctggacgacctcgcggagttctaccggcagtgcaaatccgtcggcatccaggaaaccagcagcggctatccgcgcatccatgcccccgaactgcaggagtggggaggcacgatggccgctttggtccggatctttgtgaaggaaccttacttctgtggtgtgacataattggacaaactacctacagagatttaaagctctaaggtaaatataaaatttttaagtgtataatgtgttaaactactgattctaattgtttgtgtattttagattccaacctatggaactgatgaatgggagcagtggtggaatgcctttaatgaggaaaacctgttttgctcagaagaaatgccatctagtgatgatgaggctactgctgactctcaacattctactcctccaaaaaagaagagaaaggtagaagaccccaaggactttccttcagaattgctaagttttttgagtcatgctgtgtttagtaatagaactcttgcttgctttgctatttacaccacaaaggaaaaagctgcactgctatacaagaaaattatggaaaaatattctgtaacctttataagtaggcataacagttataatcataacatactgttttttcttactccacacaggcatagagtgt

SEQ ID NO: 102 - DNA, 9651 bp, synthetic construct
  source 1..9651: mol_type = other DNA
ctgctattaataactatgctcaaaaattgtgtacctttagctttttaatttgtaaaggggttaataaggaatatttgatgtatagtgccttgactagagatcataatcagccataccacatttgtagaggttttacttgctttaaaaaacctcccacacctccccctgaacctgaaacataaaatgaatgcaattgttgttgttctagcttggccactccctctctgcgcgctcgctcgctcactgaggccgggcgaccaaaggtcgcccgacgcccgggctttgcccgggcggcctcagtgagcgagcgagcgcgcagagagggagtggccaactccatcactaggggttcctctcgaggcggccgcaggctcagaggcacacaggagtttctgggctcaccctgcccccttccaacccctcagttcccatcctccagcagctgtttgtgtgctgcctctgaagtccacactgaacaaacttcagcctactcatgtccctaaaatgggcaaacattgcaagcagcaaacagcaaacacacagccctccctgcctgctgaccttggagctggggcagaggtcagagacctctctgggcccatgccacctccaacatccactcgaccccttggaatttcggtggagaggagcagaggttgtcctggcgtggtttaggtagtgtgagaggggtcgacgatcttgctaccagtggaacagccactaaggattctgcagtgagagcagagggccagctaagtggtactctcccagagactgtctgactcacgccaccccctccaccttggacacaggacgctgtggtttctgagccaggtacaatgactcctttcggtaagtgcagtggaagctgtacactgcccaggcaaagcgtccgggcagcgtaggcgggcgactcagatcccagccagtggacttagcccctgtttgctcctccgataactggggtgaccttggttaatattcaccagcagcctcccccgttgcccctctggatccactgcttaaatacggacgaggacagggccctgtctcctcagcttcaggcaccaccactgacctgggacagtgaatcgtaagtatgcctttcactgcgagaggttctggagaggcttctgagctccccatggcccaggcaggcagcaggtctggggcaggaggggggttgtggagtgggtatccgcctgctgaggtgcagggcagatcatcatgtgccttgactcggggcctggcccccccatctctgtcttgcaggacaattgccgtcttctgtctcgtggggcatcctcctgctggcaggcctgtgctgcctggtccctgtctccctggctgaggaccgggtaccgccaccatgagcacagcagtgcttgagaaccctggcctgggcaggaagctgtctgactttggccaggagactagctacattgaggacaactgcaaccaaaatggagccatcagcctgatcttctccctgaaggaagaggttggagcccttgccaaggtcctgagactgtttgaggagaatgatgtgaacctcacccacatagagagcagacctagcaggctgaaaaaggatgagtatgagttcttcacccacctggacaagaggagcctgccagccttaaccaacatcatcaagatcttgagacatgacattggagccacagtgcatgaactctctagagacaagaagaaggacactgtgccttggttccctagaaccatccaggaactggacagatttgccaaccagatcctgagctatggagctgagctggatgctgaccaccctggcttcaaggaccctgtgtacagagccaggagaaagcagtttgctgacattgcctacaactacagacacggccagcccatccccagagtggagtacatggaggaagagaagaagacctggggcacagtgttcaagaccctgaagagcctgtacaagacccatgcctgttatgaatacaaccacatcttccctctgctggaaaagtactgtggcttccacgaagacaacatcccacagctggaggatgtgtcccagttcctgcagacctgcacaggcttcagactgagacctgtggctggcctgctgagcagcagagacttcctgggaggcctggccttcagggtgttccactgcacccagtacatcagacacggcagcaagcccatgtacaccccagagcctgacatctgccatgagctgctgggccatgtgcctctgttcagtgatagaagctttgcccagttctcccaggaaattggcctggccagcctgggggcccctgatgagtacatagaaaaactggccaccatctactggttcacagttgagtttggcctgtgtaaacagggtgacagcatcaaggcctatggagctggcctgctgagcagctttggagagctgcagtactgcctgtctgagaagcccaagctgctgcctctggagctggaaaagacagctatccaaaactacacagtgacagagttccaacccctgtactatgtggcagaatccttcaatgatgccaaggagaaggtgagaaactttgctgccaccatccctagacccttctctgtgaggtatgacccttacacccagagaatagaagtgctggataacacccagcagctgaaaatcttggctgacagcatcaactctgaaattggcatcctgtgctctgccctgcagaaaatcaaatgaagatctgcctcgactgtgccttctagttgccagccatctgttgtttgcccctcccccgtgccttccttgaccctggaaggtgccactcccactgtcctttcctaataaaatgaggaaattgcatcgcattgtctgagtaggtgtcattctattctggggggtggggtggggcaggacagcaagggggaggattgggaagacaatagcaggcatgctggggatgcggtgggctctatggatcccctaactacaaggaacccctagtgatggagttggccactccctctctgcgcgctcgctcgctcactgaggccgggcgaccaaaggtcgcccgacgcccgggctttgcccgggcggcctcagtgagcgagcgagcgcgcagagagggagtggccaacaggaagctcctctgtgtcctcataaaccctaacctcctctacttgagaggacattccaatcataggctgcccatccaccctctgtgtcctcctgttaattaggtcacttaacaaaaaggaaattgggtaggggtttttcacagaccgctttctaagggtaattttaaaatatctgggaagtcccttccactgctgtgttccagaagtgttggtaaacagcccacaaatgtcaacagcagaaacatacaagctgtcagctttgcacaagggcccaatctctggaagatccgcgcgtaccgagttctaattcactggccgtcgttttacaacgtcgtgactgggaaaaccctggcgttacccaacttaatcgccttgcagcacatccccctttcgccagctggcgtaatagcgaagaggcccgcaccgatcgcccttcccaacagttgcgcagcctgaatggcgaatggcgcctgatgcggtattttctccttacgcatctgtgcggtatttcacaccgcatatggtgcactctcagtacaatctgctctgatgccgcatagttaagccagccccgacacccgccaacacccgctgacgcgccctgacgggcttgtctgctcccggcatccgcttacagacaagctgtgaccgtctccgggagctgcatgtgtcagaggttttcaccgtcatcaccgaaacgcgcgagacgaaagggcctcgtgatacgcctatttttataggttaatgtcatgataataatggtttcttagacgtcaggtggcacttttcggggaaatgtgcgcggaacccccatttgtttatttttctaaatacattcaaatatgtatccgctcatgagacaataaccctgataaatgcttcaataatattgaaaaaggaagagtatgagccatattcaacgggaaacgtcttgctctaggccgcgattaaattccaacatggatgctgatttatatgggtataaatgggctcgcgataatgtcgggcaatcaggtgcgacaatctatcgattgtatgggaagcccgatgcgccagagttgtttctgaaacatggcaaaggtagcgttgccaatgatgttacagatgagatggtcagactaaactggctgacggaatttatgcctcttccgaccatcaagcattttatccgtactcctgatgatgcatggttactcaccactgcgatccctgggaaaacagcattccaggtattagaagaatatcctgattcaggtgaaaatattgttgatgcgctggcagtgttcctgcgccggttgcattcgattcctgtttgtaattgtccttttaacagcgatcgcgtatttcgtctcgctcaggcgcaatcacgaatgaataacggtttggttgatgcgagtgattttgatgacgagcgtaatggctggcctgttgaacaagtctggaaagaaatgcataaacttttgccattctcaccggattcagtcgtcactcatggtgatttctcacttgataaccttatttttgacgaggggaaattaataggttgtattgatgttggacgagtcggaatcgcagaccgataccaggatcttgccatcctatggaactgcctcggtgagttttctccttcattacagaaacggctttttcaaaaatatggtattgataatcctgatatgaataaattgcagtttcatttgatgctcgatgagtttttctaaaagcttgtgcaatgccacaaagaagagtcaatcgcagacaacattttgaatgcggtcacacgttagcagcatgattgccacggatggcaacatattaacggcatgatattgacttattgaataaaattgggtaaatttgactcaacgatgggttaattcgctcgttgtggtagtgagatgaaaagaggcggcgcttactaccgattccgcctagttggtcacttcgacgtatcgtctggaactccaaccatcgcaggcagagaggtctgcaaaatgcaatcccgaaacagttcgcaggtaatagttagagcctgcataacggtttcgggattttttatatctgcacaacaggtaagagcattgagtcgataatcgtgaagagtcggcgagcctggttagccagtgctctttccgttgtgctgaattaagcgaataccggaagcagaaccggatcaccaaatgcgtacaggcgtcatcgccgcccagcaacagcacaacccaaactgagccgtagccactgtctgtcctgaattcattagtaatagttacgctgcggccttttacacatgaccttcgtgaaagcgggtggcaggaggtcgcgctaacaacctcctgccgttttgcccgtgcatatcggtcacgaacaaatctgattactaaacacagtagcctggatttgttctatcagtaatcgaccttattcctaattaaatagagcaaatccccttattgggggtaagacatgaagatgccagaaaaacatgacctgttggccgccattctcgcggcaaaggaacaaggcatcggggcaatccttgcgtttgcaatggcgtaccttcgcggcagatataatggcggtgcgtttacaaaaacagtaatcgacgcaacgatgtgcgccattatcgcctggttcattcgtgaccttctcgacttcgccggactaagtagcaatctcgcttatataacgagcgtgtttatcggctacatcggtactgactcgattggttcgcttatcaaacgcttcgctgctaaaaaagccggagtagaagatggtagaaatcaataatcaacgtaaggcgttcctcgatatgctggcgtggtcggagggaactgataacggacgtcagaaaaccagaaatcatggttatgacgtcattgtaggcggagagctatttactgattactccgatcaccctcgcaaacttgtcacgctaaacccaaaactcaaatcaacaggcgccggacgctaccagcttctttcccgttggtgggatgcctaccgcaagcagcttggcctgaaagacttctctccgaaaagtcaggacgctgtggcattgcagcagattaaggagcgtggcgctttacctatgattgatcgtggtgatatccgtcaggcaatcgaccgttgcagcaatatctgggcttcactgccgggcgctggttatggtcagttcgagcataaggctgacagcctgattgcaaaattcaaagaagcgggcggaacggtcagagagattgatgtatgagcagagtcaccgcgattatctccgctctggttatctgcatcatcgtctgcctgtcatgggctgttaatcattaccgtgataacgccattacctacaaagcccagcgcgacaaaaatgccagagaactgaagctggcgaacgcggcaattactgacatgcagatgcgtcagcgtgatgttgctgcgctcgatgcaaaatacacgaaggagttagctgatgctaaagctgaaaatgatgctctgcgtgatgatgttgccgctggtcgtcgtcggttgcacatcaaagcagtctgtcagtcagtgcgtgaagccaccaccgcctccggcgtggataatgcagcctccccccgactggcagacaccgctgaacgggattatttcaccctcagagagaggctgatcactatgcaaaaacaactggaaggaacccagaagtatattaatgagcagtgcagatagagttgcccatatcgatgggcaactcatgcaattattgtgagcaatacacacgcgcttccagcggagtataaatgcctaaagtaataaaaccgagcaatccatttacgaatgtttgctgggtttctgttttaacaacattttctgcgccgccacaaattttggctgcatcgacagttttcttctgcccaattccagaaacgaagaaatgatgggtgatggtttcctttggtgctactgctgccggtttgttttgaacagtaaacgtctgttgagcacatcctgtaataagcagggccagcgcagtagcgagtagcatttttttcatggtgttattcccgatgctttttgaagttcgcagaatcgtatgtgtagaaaattaaacaaaccctaaacaatgagttgaaatttcatattgttaatatttattaatgtatgtcaggtgcgatgaatcgtcattgtattcccggattaactatgtccacagccctgacggggaacttctctgcgggagtgtccgggaataattaaaacgatgcacacagggtttagcgcgtacacgtattgcattatgccaacgccccggtgctgacacggaagaaaccggacgttatgatttagcgtggaaagatttgtgtagtgttctgaatgctctcagtaaatagtaatgaattatcaaaggtatagtaatatcttttatgttcatggatatttgtaacccatcggaaaactcctgctttagcaagattttccctgtattgctgaaatgtgatttctcttgatttcaacctatcataggacgtttctataagatgcgtgtttcttgagaatttaacatttacaacctttttaagtccttttattaacacggtgttatcgttttctaacacgatgtgaatattatctgtggctagatagtaaatataatgtgagacgttgtgacgtttgctagcctgtcagaccaagtttactcatatatactttagattgatttaaaacttcatttttaatttaaaaggatctaggtgaagatcctttttgataatctcatgaccaaaatcccttaacgtgagttttcgttccactgagcgtcagaccccgtagaaaagatcaaaggatcttcttgagatcctttttttctgcgcgtaatctgctgcttgcaaacaaaaaaaccaccgctaccagcggtggtttgtttgccggatcaagagctaccaactctttttccgaaggtaactggcttcagcagagcgcagataccaaatactgttcttctagtgtagccgtagttaggccaccacttcaagaactctgtagcaccgcctacatacctcgctctgctaatcctgttaccagtggctgctgccagtggcgataagtcgtgtcttaccgggttggactcaagacgatagttaccggataaggcgcagcggtcgggctgaacggggggttcgtgcacacagcccagcttggagcgaacgacctacaccgaactgagatacctacagcgtgagctatgagaaagcgccacgcttcccgaagggagaaaggcggacaggtatccggtaagcggcagggtcggaacaggagagcgcacgagggagcttccagggggaaacgcctggtatctttatagtcctgtcgggtttcgccacctctgacttgagcgtcgatttttgtgatgctcgtcaggggggcggagcctatggaaaaacgccagcaacgcggcctttttacggttcctggccttttgctggccttttgctcacatgttctttcctgcgttatcccctgattctgtggataaccgtattaccgcctttgagtgagctgataccgctcgccgcagccgaacgaccgagcgcagcgagtcagtgagcgaggaagcggaagagcgcccaatacgcaaaccgcctctccccgcgcgttggccgattcattaatgcagctggcacgacaggtttcccgactggaaagcgggcagtgagcgcaacgcaattaatgtgagttagctcactcattaggcaccccaggctttacactttatgcttccggctcgtatgttgtgtggaattgtgagcggataacaatttcacacaggaaacagctatgaccatgattacgccaagtttgcacgcctgccgttcgacgatttcgcgagttggttcagctgctgcctgaggctggacgacctcgcggagttctaccggcagtgcaaatccgtcggcatccaggaaaccagcagcggctatccgcgcatccatgcccccgaactgcaggagtggggaggcacgatggccgctttggtccggatctttgtgaaggaaccttacttctgtggtgtgacataattggacaaactacctacagagatttaaagctctaaggtaaatataaaatttttaagtgtataatgtgttaaactactgattctaattgtttgtgtattttagattccaacctatggaactgatgaatgggagcagtggtggaatgcctttaatgaggaaaacctgttttgctcagaagaaatgccatctagtgatgatgaggctactgctgactctcaacattctactcctccaaaaaagaagagaaaggtagaagaccccaaggactttccttcagaattgctaagttttttgagtcatgctgtgtttagtaatagaactcttgcttgctttgctatttacaccacaaaggaaaaagctgcactgctatacaagaaaattatggaaaaatattctgtaacctttataagtaggcataacagttataatcataacatactgttttttcttactccacacaggcatagagtgt

SEQ ID NO: 103 - DNA, 9651 bp, synthetic construct
  source 1..9651: mol_type = other DNA
ctgctattaataactatgctcaaaaattgtgtacctttagctttttaatttgtaaaggggttaataaggaatatttgatgtatagtgccttgactagagatcataatcagccataccacatttgtagaggttttacttgctttaaaaaacctcccacacctccccctgaacctgaaacataaaatgaatgcaattgttgttgttctagcttggccactccctctctgcgcgctcgctcgctcactgaggccgggcgaccaaaggtcgcccgacgcccgggctttgcccgggcggcctcagtgagcgagcgagcgcgcagagagggagtggccaactccatcactaggggttcctctcgaggcggccgcaggctcagaggcacacaggagtttctgggctcaccctgcccccttccaacccctcagttcccatcctccagcagctgtttgtgtgctgcctctgaagtccacactgaacaaacttcagcctactcatgtccctaaaatgggcaaacattgcaagcagcaaacagcaaacacacagccctccctgcctgctgaccttggagctggggcagaggtcagagacctctctgggcccatgccacctccaacatccactcgaccccttggaatttcggtggagaggagcagaggttgtcctggcgtggtttaggtagtgtgagaggggtcgacgatcttgctaccagtggaacagccactaaggattctgcagtgagagcagagggccagctaagtggtactctcccagagactgtctgactcacgccaccccctccaccttggacacaggacgctgtggtttctgagccaggtacaatgactcctttcggtaagtgcagtggaagctgtacactgcccaggcaaagcgtccgggcagcgtaggcgggcgactcagatcccagccagtggacttagcccctgtttgctcctccgataactggggtgaccttggttaatattcaccagcagcctcccccgttgcccctctggatccactgcttaaatacggacgaggacagggccctgtctcctcagcttcaggcaccaccactgacctgggacagtgaatcgtaagtatgcctttcactgcgagaggttctggagaggcttctgagctccccatggcccaggcaggcagcaggtctggggcaggaggggggttgtggagtgggtatccgcctgctgaggtgcagggcagatcatcatgtgccttgactcggggcctggcccccccatctctgtcttgcaggacaattgccgtcttctgtctcgtggggcatcctcctgctggcaggcctgtgctgcctggtccctgtctccctggctgaggaccgggtaccgccaccatgagcacagcagtgttggagaaccctggcctgggcaggaaactgtctgactttggccaggaaaccagctacattgaggataactgtaaccagaatggagccatcagcctgatcttcagcctgaaagaggaggtgggggccctggccaaggtgctgagactgtttgaggaaaatgatgtcaacctgacccacattgagtccagacccagcagactcaagaaagatgaatatgagttcttcacacacctggacaagagaagcctgcctgccctgaccaacatcatcaagatcctgagacatgacataggagccacagtgcatgaactgagcagagacaagaagaaggacacagtgccctggttccctagaaccatccaggaactggacagatttgccaaccagatcctgagttatggagctgagctggatgctgaccacccaggcttcaaggaccctgtgtacagagccagaaggaagcagtttgctgacattgcctacaactacagacacggccagcctatccccagagtggaatacatggaagaggagaagaagacctggggcactgtgttcaagacccttaagtctctgtacaaaacccacgcctgctatgaatacaaccacatcttccctctgctggagaagtactgtggcttccacgaagacaatatcccccagctggaggatgtgagccagttcctgcaaacctgcactggcttcagactgagacctgtggcaggcctgctgagcagcagagacttcctgggtggcctggccttcagagtcttccactgtacccagtacatcaggcatggcagcaagcccatgtacacaccagagcctgacatctgccacgagctgctgggccatgtgcctctgttctcagacagaagctttgcccagttctcccaggagattggcttagcctccttaggagcccctgatgaatacatagagaaactggccaccatctactggttcacagtggagtttggcctgtgcaagcaaggtgacagcatcaaggcctatggagctggcctgctgagcagctttggagaacttcagtactgcctctctgagaagcccaaactgctgcctctggaactggagaagacagccatccagaactacacagtgacagaattccaacctctgtactatgttgctgagagcttcaatgatgccaaagagaaggtgagaaactttgctgccaccatccccagacccttctctgtgaggtatgacccttacacccagagaattgaagtgctggataacacccagcagctgaagatcctagctgacagcatcaactctgagataggcatcctgtgctctgccctgcaaaagatcaagtgaagatctgcctcgactgtgccttctagttgccagccatctgttgtttgcccctcccccgtgccttccttgaccctggaaggtgccactcccactgtcctttcctaataaaatgaggaaattgcatcgcattgtctgagtaggtgtcattctattctggggggtggggtggggcaggacagcaagggggaggattgggaagacaatagcaggcatgctggggatgcggtgggctctatggatcccctaactacaaggaacccctagtgatggagttggccactccctctctgcgcgctcgctcgctcactgaggccgggcgaccaaaggtcgcccgacgcccgggctttgcccgggcggcctcagtgagcgagcgagcgcgcagagagggagtggccaacaggaagctcctctgtgtcctcataaaccctaacctcctctacttgagaggacattccaatcataggctgcccatccaccctctgtgtcctcctgttaattaggtcacttaacaaaaaggaaattgggtaggggtttttcacagaccgctttctaagggtaattttaaaatatctgggaagtcccttccactgctgtgttccagaagtgttggtaaacagcccacaaatgtcaacagcagaaacatacaagctgtcagctttgcacaagggcccaatctctggaagatccgcgcgtaccgagttctaattcactggccgtcgttttacaacgtcgtgactgggaaaaccctggcgttacccaacttaatcgccttgcagcacatccccctttcgccagctggcgtaatagcgaagaggcccgcaccgatcgcccttcccaacagttgcgcagcctgaatggcgaatggcgcctgatgcggtattttctccttacgcatctgtgcggtatttcacaccgcatatggtgcactctcagtacaatctgctctgatgccgcatagttaagccagccccgacacccgccaacacccgctgacgcgccctgacgggcttgtctgctcccggcatccgcttacagacaagctgtgaccgtctccgggagctgcatgtgtcagaggttttcaccgtcatcaccgaaacgcgcgagacgaaagggcctcgtgatacgcctatttttataggttaatgtcatgataataatggtttcttagacgtcaggtggcacttttcggggaaatgtgcgcggaacccccatttgtttatttttctaaatacattcaaatatgtatccgctcatgagacaataaccctgataaatgcttcaataatattgaaaaaggaagagtatgagccatattcaacgggaaacgtcttgctctaggccgcgattaaattccaacatggatgctgatttatatgggtataaatgggctcgcgataatgtcgggcaatcaggtgcgacaatctatcgattgtatgggaagcccgatgcgccagagttgtttctgaaacatggcaaaggtagcgttgccaatgatgttacagatgagatggtcagactaaactggctgacggaatttatgcctcttccgaccatcaagcattttatccgtactcctgatgatgcatggttactcaccactgcgatccctgggaaaacagcattccaggtattagaagaatatcctgattcaggtgaaaatattgttgatgcgctggcagtgttcctgcgccggttgcattcgattcctgtttgtaattgtccttttaacagcgatcgcgtatttcgtctcgctcaggcgcaatcacgaatgaataacggtttggttgatgcgagtgattttgatgacgagcgtaatggctggcctgttgaacaagtctggaaagaaatgcataaacttttgccattctcaccggattcagtcgtcactcatggtgatttctcacttgataaccttatttttgacgaggggaaattaataggttgtattgatgttggacgagtcggaatcgcagaccgataccaggatcttgccatcctatggaactgcctcggtgagttttctccttcattacagaaacggctttttcaaaaatatggtattgataatcctgatatgaataaattgcagtttcatttgatgctcgatgagtttttctaaaagcttgtgcaatgccacaaagaagagtcaatcgcagacaacattttgaatgcggtcacacgttagcagcatgattgccacggatggcaacatattaacggcatgatattgacttattgaataaaattgggtaaatttgactcaacgatgggttaattcgctcgttgtggtagtgagatgaaaagaggcggcgcttactaccgattccgcctagttggtcacttcgacgtatcgtctggaactccaaccatcgcaggcagagaggtctgcaaaatgcaatcccgaaacagttcgcaggtaatagttagagcctgcataacggtttcgggattttttatatctgcacaacaggtaagagcattgagtcgataatcgtgaagagtcggcgagcctggttagccagtgctctttccgttgtgctgaattaagcgaataccggaagcagaaccggatcaccaaatgcgtacaggcgtcatcgccgcccagcaacagcacaacccaaactgagccgtagccactgtctgtcctgaattcattagtaatagttacgctgcggccttttacacatgaccttcgtgaaagcgggtggcaggaggtcgcgctaacaacctcctgccgttttgcccgtgcatatcggtcacgaacaaatctgattactaaacacagtagcctggatttgttctatcagtaatcgaccttattcctaattaaatagagcaaatccccttattgggggtaagacatgaagatgccagaaaaacatgacctgttggccgccattctcgcggcaaaggaacaaggcatcggggcaatccttgcgtttgcaatggcgtaccttcgcggcagatataatggcggtgcgtttacaaaaacagtaatcgacgcaacgatgtgcgccattatcgcctggttcattcgtgaccttctcgacttcgccggactaagtagcaatctcgcttatataacgagcgtgtttatcggctacatcggtactgactcgattggttcgcttatcaaacgcttcgctgctaaaaaagccggagtagaagatggtagaaatcaataatcaacgtaaggcgttcctcgatatgctggcgtggtcggagggaactgataacggacgtcagaaaaccagaaatcatggttatgacgtcattgtaggcggagagctatttactgattactccgatcaccctcgcaaacttgtcacgctaaacccaaaactcaaatcaacaggcgccggacgctaccagcttctttcccgttggtgggatgcctaccgcaagcagcttggcctgaaagacttctctccgaaaagtcaggacgctgtggcattgcagcagattaaggagcgtggcgctttacctatgattgatcgtggtgatatccgtcaggcaatcgaccgttgcagcaatatctgggcttcactgccgggcgctggttatggtcagttcgagcataaggctgacagcctgattgcaaaattcaaagaagcgggcggaacggtcagagagattgatgtatgagcagagtcaccgcgattatctccgctctggttatctgcatcatcgtctgcctgtcatgggctgttaatcattaccgtgataacgccattacctacaaagcccagcgcgacaaaaatgccagagaactgaagctggcgaacgcggcaattactgacatgcagatgcgtcagcgtgatgttgctgcgctcgatgcaaaatacacgaaggagttagctgatgctaaagctgaaaatgatgctctgcgtgatgatgttgccgctggtcgtcgtcggttgcacatcaaagcagtctgtcagtcagtgcgtgaagccaccaccgcctccggcgtggataatgcagcctccccccgactggcagacaccgctgaacgggattatttcaccctcagagagaggctgatcactatgcaaaaacaactggaaggaacccagaagtatattaatgagcagtgcagatagagttgcccatatcgatgggcaactcatgcaattattgtgagcaatacacacgcgcttccagcggagtataaatgcctaaagtaataaaaccgagcaatccatttacgaatgtttgctgggtttctgttttaacaacattttctgcgccgccacaaattttggctgcatcgacagttttcttctgcccaattccagaaacgaagaaatgatgggtgatggtttcctttggtgctactgctgccggtttgttttgaacagtaaacgtctgttgagcacatcctgtaataagcagggccagcgcagtagcgagtagcatttttttcatggtgttattcccgatgctttttgaagttcgcagaatcgtatgtgtagaaaattaaacaaaccctaaacaatgagttgaaatttcatattgttaatatttattaatgtatgtcaggtgcgatgaatcgtcattgtattcccggattaactatgtccacagccctgacggggaacttctctgcgggagtgtccgggaataattaaaacgatgcacacagggtttagcgcgtacacgtattgcattatgccaacgccccggtgctgacacggaagaaaccggacgttatgatttagcgtggaaagatttgtgtagtgttctgaatgctctcagtaaatagtaatgaattatcaaaggtatagtaatatcttttatgttcatggatatttgtaacccatcggaaaactcctgctttagcaagattttccctgtattgctgaaatgtgatttctcttgatttcaacctatcataggacgtttctataagatgcgtgtttcttgagaatttaacatttacaacctttttaagtccttttattaacacggtgttatcgttttctaacacgatgtgaatattatctgtggctagatagtaaatataatgtgagacgttgtgacgtttgctagcctgtcagaccaagtttactcatatatactttagattgatttaaaacttcatttttaatttaaaaggatctaggtgaagatcctttttgataatctcatgaccaaaatcccttaacgtgagttttcgttccactgagcgtcagaccccgtagaaaagatcaaaggatcttcttgagatcctttttttctgcgcgtaatctgctgcttgcaaacaaaaaaaccaccgctaccagcggtggtttgtttgccggatcaagagctaccaactctttttccgaaggtaactggcttcagcagagcgcagataccaaatactgttcttctagtgtagccgtagttaggccaccacttcaagaactctgtagcaccgcctacatacctcgctctgctaatcctgttaccagtggctgctgccagtggcgataagtcgtgtcttaccgggttggactcaagacgatagttaccggataaggcgcagcggtcgggctgaacggggggttcgtgcacacagcccagcttggagcgaacgacctacaccgaactgagatacctacagcgtgagctatgagaaagcgccacgcttcccgaagggagaaaggcggacaggtatccggtaagcggcagggtcggaacaggagagcgcacgagggagcttccagggggaaacgcctggtatctttatagtcctgtcgggtttcgccacctctgacttgagcgtcgatttttgtgatgctcgtcaggggggcggagcctatggaaaaacgccagcaacgcggcctttttacggttcctggccttttgctggccttttgctcacatgttctttcctgcgttatcccctgattctgtggataaccgtattaccgcctttgagtgagctgataccgctcgccgcagccgaacgaccgagcgcagcgagtcagtgagcgaggaagcggaagagcgcccaatacgcaaaccgcctctccccgcgcgttggccgattcattaatgcagctggcacgacaggtttcccgactggaaagcgggcagtgagcgcaacgcaattaatgtgagttagctcactcattaggcaccccaggctttacactttatgcttccggctcgtatgttgtgtggaattgtgagcggataacaatttcacacaggaaacagctatgaccatgattacgccaagtttgcacgcctgccgttcgacgatttcgcgagttggttcagctgctgcctgaggctggacgacctcgcggagttctaccggcagtgcaaatccgtcggcatccaggaaaccagcagcggctatccgcgcatccatgcccccgaactgcaggagtggggaggcacgatggccgctttggtccggatctttgtgaaggaaccttacttctgtggtgtgacataattggacaaactacctacagagatttaaagctctaaggtaaatataaaatttttaagtgtataatgtgttaaactactgattctaattgtttgtgtattttagattccaacctatggaactgatgaatgggagcagtggtggaatgcctttaatgaggaaaacctgttttgctcagaagaaatgccatctagtgatgatgaggctactgctgactctcaacattctactcctccaaaaaagaagagaaaggtagaagaccccaaggactttccttcagaattgctaagttttttgagtcatgctgtgtttagtaatagaactcttgcttgctttgctatttacaccacaaaggaaaaagctgcactgctatacaagaaaattatggaaaaatattctgtaacctttataagtaggcataacagttataatcataacatactgttttttcttactccacacaggcatagagtgt

SEQ ID NO: 104 - DNA, 9651 bp, synthetic construct
  source 1..9651: mol_type = other DNA
ctgctattaataactatgctcaaaaattgtgtacctttagctttttaatttgtaaaggggttaataaggaatatttgatgtatagtgccttgactagagatcataatcagccataccacatttgtagaggttttacttgctttaaaaaacctcccacacctccccctgaacctgaaacataaaatgaatgcaattgttgttgttctagcttggccactccctctctgcgcgctcgctcgctcactgaggccgggcgaccaaaggtcgcccgacgcccgggctttgcccgggcggcctcagtgagcgagcgagcgcgcagagagggagtggccaactccatcactaggggttcctctcgaggcggccgcaggctcagaggcacacaggagtttctgggctcaccctgcccccttccaacccctcagttcccatcctccagcagctgtttgtgtgctgcctctgaagtccacactgaacaaacttcagcctactcatgtccctaaaatgggcaaacattgcaagcagcaaacagcaaacacacagccctccctgcctgctgaccttggagctggggcagaggtcagagacctctctgggcccatgccacctccaacatccactcgaccccttggaatttcggtggagaggagcagaggttgtcctggcgtggtttaggtagtgtgagaggggtcgacgatcttgctaccagtggaacagccactaaggattctgcagtgagagcagagggccagctaagtggtactctcccagagactgtctgactcacgccaccccctccaccttggacacaggacgctgtggtttctgagccaggtacaatgactcctttcggtaagtgcagtggaagctgtacactgcccaggcaaagcgtccgggcagcgtaggcgggcgactcagatcccagccagtggacttagcccctgtttgctcctccgataactggggtgaccttggttaatattcaccagcagcctcccccgttgcccctctggatccactgcttaaatacggacgaggacagggccctgtctcctcagcttcaggcaccaccactgacctgggacagtgaatcgtaagtatgcctttcactgcgagaggttctggagaggcttctgagctccccatggcccaggcaggcagcaggtctggggcaggaggggggttgtggagtgggtatccgcctgctgaggtgcagggcagatcatcatgtgccttgactcggggcctggcccccccatctctgtcttgcaggacaattgccgtcttctgtctcgtggggcatcctcctgctggcaggcctgtgctgcctggtccctgtctccctggctgaggaccgggtaccgccaccatgagcacagctgtgctggagaaccctggcctgggcagaaagctgtctgactttggccaggagacctcttacattgaagacaactgcaaccagaatggggccatcagcctgatcttcagtctgaaggaagaagtgggagccctggccaaggtactgagactgtttgaggaaaatgatgtcaaccttacccacattgagagcagacccagcagactgaagaaggatgagtatgagttcttcacccacctggacaaaagatccctgcctgccctgaccaacatcatcaagatcctgagacacgacattggagccacagtgcatgagctcagcagggacaagaagaaggacacagtgccctggttccctagaaccatccaggagctggacagatttgccaaccagatcctgagctatggagcagaactggatgctgaccacccaggcttcaaagaccctgtgtacagggccagaaggaagcagtttgctgacatagcctacaattacagacatggccagcccatccctagagtggagtacatggaggaggaaaagaagacctggggcactgtcttcaaaaccctgaagtccctgtacaaaacccacgcctgctatgagtacaaccacatcttccctctgctggaaaagtactgtggcttccacgaagataacatccctcagttagaggatgtgagccagttcctgcagacatgcacaggcttcagactgagaccagtggcaggcctgctgtcttccagagatttcctggggggcctggccttcagggtgttccactgcacccagtacatcaggcacggcagcaagcctatgtacacccctgagcctgacatctgccatgagctgctgggccacgtgcctctgttctctgacagaagctttgcccagttcagccaggagattggccttgccagcttaggagcccctgatgaatacatagagaagctggccaccatctactggttcacagtggaatttggcctgtgtaagcagggagacagcatcaaggcctatggagctggcctgcttagcagctttggagagctgcagtactgcctgtcagagaagcccaaactgctgccactggaactggaaaagacagccatccaaaactacacagtgacagagttccagcccctgtactatgttgctgagtctttcaatgatgccaaggagaaggtgagaaactttgctgccaccatccccagacccttctcagtgagatatgacccttacacccaaagaatagaggtgctggacaacacccagcagctgaagatcctggcagacagcatcaactctgaaattggcatcctgtgttctgccctgcaaaaaatcaagtgaagatctgcctcgactgtgccttctagttgccagccatctgttgtttgcccctcccccgtgccttccttgaccctggaaggtgccactcccactgtcctttcctaataaaatgaggaaattgcatcgcattgtctgagtaggtgtcattctattctggggggtggggtggggcaggacagcaagggggaggattgggaagacaatagcaggcatgctggggatgcggtgggctctatggatcccctaactacaaggaacccctagtgatggagttggccactccctctctgcgcgctcgctcgctcactgaggccgggcgaccaaaggtcgcccgacgcccgggctttgcccgggcggcctcagtgagcgagcgagcgcgcagagagggagtggccaacaggaagctcctctgtgtcctcataaaccctaacctcctctacttgagaggacattccaatcataggctgcccatccaccctctgtgtcctcctgttaattaggtcacttaacaaaaaggaaattgggtaggggtttttcacagaccgctttctaagggtaattttaaaatatctgggaagtcccttccactgctgtgttccagaagtgttggtaaacagcccacaaatgtcaacagcagaaacatacaagctgtcagctttgcacaagggcccaatctctggaagatccgcgcgtaccgagttctaattcactggccgtcgttttacaacgtcgtgactgggaaaaccctggcgttacccaacttaatcgccttgcagcacatccccctttcgccagctggcgtaatagcgaagaggcccgcaccgatcgcccttcccaacagttgcgcagcctgaatggcgaatggcgcctgatgcggtattttctccttacgcatctgtgcggtatttcacaccgcatatggtgcactctcagtacaatctgctctgatgccgcatagttaagccagccccgacacccgccaacacccgctgacgcgccctgacgggcttgtctgctcccggcatccgcttacagacaagctgtgaccgtctccgggagctgcatgtgtcagaggttttcaccgtcatcaccgaaacgcgcgagacgaaagggcctcgtgatacgcctatttttataggttaatgtcatgataataatggtttcttagacgtcaggtggcacttttcggggaaatgtgcgcggaacccccatttgtttatttttctaaatacattcaaatatgtatccgctcatgagacaataaccctgataaatgcttcaataatattgaaaaaggaagagtatgagccatattcaacgggaaacgtcttgctctaggccgcgattaaattccaacatggatgctgatttatatgggtataaatgggctcgcgataatgtcgggcaatcaggtgcgacaatctatcgattgtatgggaagcccgatgcgccagagttgtttctgaaacatggcaaaggtagcgttgccaatgatgttacagatgagatggtcagactaaactggctgacggaatttatgcctcttccgaccatcaagcattttatccgtactcctgatgatgcatggttactcaccactgcgatccctgggaaaacagcattccaggtattagaagaatatcctgattcaggtgaaaatattgttgatgcgctggcagtgttcctgcgccggttgcattcgattcctgtttgtaattgtccttttaacagcgatcgcgtatttcgtctcgctcaggcgcaatcacgaatgaataacggtttggttgatgcgagtgattttgatgacgagcgtaatggctggcctgttgaacaagtctggaaagaaatgcataaacttttgccattctcaccggattcagtcgtcactcatggtgatttctcacttgataaccttatttttgacgaggggaaattaataggttgtattgatgttggacgagtcggaatcgcagaccgataccaggatcttgccatcctatggaactgcctcggtgagttttctccttcattacagaaacggctttttcaaaaatatggtattgataatcctgatatgaataaattgcagtttcatttgatgctcgatgagtttttctaaaagcttgtgcaatgccacaaagaagagtcaatcgcagacaacattttgaatgcggtcacacgttagcagcatgattgccacggatggcaacatattaacggcatgatattgacttattgaataaaattgggtaaatttgactcaacgatgggttaattcgctcgttgtggtagtgagatgaaaagaggcggcgcttactaccgattccgcctagttggtcacttcgacgtatcgtctggaactccaaccatcgcaggcagagaggtctgcaaaatgcaatcccgaaacagttcgcaggtaatagttagagcctgcataacggtttcgggattttttatatctgcacaacaggtaagagcattgagtcgataatcgtgaagagtcggcgagcctggttagccagtgctctttccgttgtgctgaattaagcgaataccggaagcagaaccggatcaccaaatgcgtacaggcgtcatcgccgcccagcaacagcacaacccaaactgagccgtagccactgtctgtcctgaattcattagtaatagttacgctgcggccttttacacatgaccttcgtgaaagcgggtggcaggaggtcgcgctaacaacctcctgccgttttgcccgtgcatatcggtcacgaacaaatctgattactaaacacagtagcctggatttgttctatcagtaatcgaccttattcctaattaaatagagcaaatccccttattgggggtaagacatgaagatgccagaaaaacatgacctgttggccgccattctcgcggcaaaggaacaaggcatcggggcaatccttgcgtttgcaatggcgtaccttcgcggcagatataatggcggtgcgtttacaaaaacagtaatcgacgcaacgatgtgcgccattatcgcctggttcattcgtgaccttctcgacttcgccggactaagtagcaatctcgcttatataacgagcgtgtttatcggctacatcggtactgactcgattggttcgcttatcaaacgcttcgctgctaaaaaagccggagtagaagatggtagaaatcaataatcaacgtaaggcgttcctcgatatgctggcgtggtcggagggaactgataacggacgtcagaaaaccagaaatcatggttatgacgtcattgtaggcggagagctatttactgattactccgatcaccctcgcaaacttgtcacgctaaacccaaaactcaaatcaacaggcgccggacgctaccagcttctttcccgttggtgggatgcctaccgcaagcagcttggcctgaaagacttctctccgaaaagtcaggacgctgtggcattgcagcagattaaggagcgtggcgctttacctatgattgatcgtggtgatatccgtcaggcaatcgaccgttgcagcaatatctgggcttcactgccgggcgctggttatggtcagttcgagcataaggctgacagcctgattgcaaaattcaaagaagcgggcggaacggtcagagagattgatgtatgagcagagtcaccgcgattatctccgctctggttatctgcatcatcgtctgcctgtcatgggctgttaatcattaccgtgataacgccattacctacaaagcccagcgcgacaaaaatgccagagaactgaagctggcgaacgcggcaattactgacatgcagatgcgtcagcgtgatgttgctgcgctcgatgcaaaatacacgaaggagttagctgatgctaaagctgaaaatgatgctctgcgtgatgatgttgccgctggtcgtcgtcggttgcacatcaaagcagtctgtcagtcagtgcgtgaagccaccaccgcctccggcgtggataatgcagcctccccccgactggcagacaccgctgaacgggattatttcaccctcagagagaggctgatcactatgcaaaaacaactggaaggaacccagaagtatattaatgagcagtgcagatagagttgcccatatcgatgggcaactcatgcaattattgtgagcaatacacacgcgcttccagcggagtataaatgcctaaagtaataaaaccgagcaatccatttacgaatgtttgctgggtttctgttttaacaacattttctgcgccgccacaaattttggctgcatcgacagttttcttctgcccaattccagaaacgaagaaatgatgggtgatggtttcctttggtgctactgctgccggtttgttttgaacagtaaacgtctgttgagcacatcctgtaataagcagggccagcgcagtagcgagtagcatttttttcatggtgttattcccgatgctttttgaagttcgcagaatcgtatgtgtagaaaattaaacaaaccctaaacaatgagttgaaatttcatattgttaatatttattaatgtatgtcaggtgcgatgaatcgtcattgtattcccggattaactatgtccacagccctgacggggaacttctctgcgggagtgtccgggaataattaaaacgatgcacacagggtttagcgcgtacacgtattgcattatgccaacgccccggtgctgacacggaagaaaccggacgttatgatttagcgtggaaagatttgtgtagtgttctgaatgctctcagtaaatagtaatgaattatcaaaggtatagtaatatcttttatgttcatggatatttgtaacccatcggaaaactcctgctttagcaagattttccctgtattgctgaaatgtgatttctcttgatttcaacctatcataggacgtttctataagatgcgtgtttcttgagaatttaacatttacaacctttttaagtccttttattaacacggtgttatcgttttctaacacgatgtgaatattatctgtggctagatagtaaatataatgtgagacgttgtgacgtttgctagcctgtcagaccaagtttactcatatatactttagattgatttaaaacttcatttttaatttaaaaggatctaggtgaagatcctttttgataatctcatgaccaaaatcccttaacgtgagttttcgttccactgagcgtcagaccccgtagaaaagatcaaaggatcttcttgagatcctttttttctgcgcgtaatctgctgcttgcaaacaaaaaaaccaccgctaccagcggtggtttgtttgccggatcaagagctaccaactctttttccgaaggtaactggcttcagcagagcgcagataccaaatactgttcttctagtgtagccgtagttaggccaccacttcaagaactctgtagcaccgcctacatacctcgctctgctaatcctgttaccagtggctgctgccagtggcgataagtcgtgtcttaccgggttggactcaagacgatagttaccggataaggcgcagcggtcgggctgaacggggggttcgtgcacacagcccagcttggagcgaacgacctacaccgaactgagatacctacagcgtgagctatgagaaagcgccacgcttcccgaagggagaaaggcggacaggtatccggtaagcggcagggtcggaacaggagagcgcacgagggagcttccagggggaaacgcctggtatctttatagtcctgtcgggtttcgccacctctgacttgagcgtcgatttttgtgatgctcgtcaggggggcggagcctatggaaaaacgccagcaacgcggcctttttacggttcctggccttttgctggccttttgctcacatgttctttcctgcgttatcccctgattctgtggataaccgtattaccgcctttgagtgagctgataccgctcgccgcagccgaacgaccgagcgcagcgagtcagtgagcgaggaagcggaagagcgcccaatacgcaaaccgcctctccccgcgcgttggccgattcattaatgcagctggcacgacaggtttcccgactggaaagcgggcagtgagcgcaacgcaattaatgtgagttagctcactcattaggcaccccaggctttacactttatgcttccggctcgtatgttgtgtggaattgtgagcggataacaatttcacacaggaaacagctatgaccatgattacgccaagtttgcacgcctgccgttcgacgatttcgcgagttggttcagctgctgcctgaggctggacgacctcgcggagttctaccggcagtgcaaatccgtcggcatccaggaaaccagcagcggctatccgcgcatccatgcccccgaactgcaggagtggggaggcacgatggccgctttggtccggatctttgtgaaggaaccttacttctgtggtgtgacataattggacaaactacctacagagatttaaagctctaaggtaaatataaaatttttaagtgtataatgtgttaaactactgattctaattgtttgtgtattttagattccaacctatggaactgatgaatgggagcagtggtggaatgcctttaatgaggaaaacctgttttgctcagaagaaatgccatctagtgatgatgaggctactgctgactctcaacattctactcctccaaaaaagaagagaaaggtagaagaccccaaggactttccttcagaattgctaagttttttgagtcatgctgtgtttagtaatagaactcttgcttgctttgctatttacaccacaaaggaaaaagctgcactgctatacaagaaaattatggaaaaatattctgtaacctttataagtaggcataacagttataatcataacatactgttttttcttactccacacaggcatagagtgt

SEQ ID NO: 105 - DNA, 9651 bp, synthetic construct
  source 1..9651: mol_type = other DNA
ctgctattaataactatgctcaaaaattgtgtacctttagctttttaatttgtaaaggggttaataaggaatatttgatgtatagtgccttgactagagatcataatcagccataccacatttgtagaggttttacttgctttaaaaaacctcccacacctccccctgaacctgaaacataaaatgaatgcaattgttgttgttctagcttggccactccctctctgcgcgctcgctcgctcactgaggccgggcgaccaaaggtcgcccgacgcccgggctttgcccgggcggcctcagtgagcgagcgagcgcgcagagagggagtggccaactccatcactaggggttcctctcgaggcggccgcaggctcagaggcacacaggagtttctgggctcaccctgcccccttccaacccctcagttcccatcctccagcagctgtttgtgtgctgcctctgaagtccacactgaacaaacttcagcctactcatgtccctaaaatgggcaaacattgcaagcagcaaacagcaaacacacagccctccctgcctgctgaccttggagctggggcagaggtcagagacctctctgggcccatgccacctccaacatccactcgaccccttggaatttcggtggagaggagcagaggttgtcctggcgtggtttaggtagtgtgagaggggtcgacgatcttgctaccagtggaacagccactaaggattctgcagtgagagcagagggccagctaagtggtactctcccagagactgtctgactcacgccaccccctccaccttggacacaggacgctgtggtttctgagccaggtacaatgactcctttcggtaagtgcagtggaagctgtacactgcccaggcaaagcgtccgggcagcgtaggcgggcgactcagatcccagccagtggacttagcccctgtttgctcctccgataactggggtgaccttggttaatattcaccagcagcctcccccgttgcccctctggatccactgcttaaatacggacgaggacagggccctgtctcctcagcttcaggcaccaccactgacctgggacagtgaatcgtaagtatgcctttcactgcgagaggttctggagaggcttctgagctccccatggcccaggcaggcagcaggtctggggcaggaggggggttgtggagtgggtatccgcctgctgaggtgcagggcagatcatcatgtgccttgactcggggcctggcccccccatctctgtcttgcaggacaattgccgtcttctgtctcgtggggcatcctcctgctggcaggcctgtgctgcctggtccctgtctccctggctgaggaccgggtaccgccaccatgagcacagctgtgttggagaacccaggcctgggcaggaagctgtctgactttggccaggaaaccagctacattgaagataactgcaaccagaatggggccatcagcctgatcttcagcctgaaggaagaggtgggagccctggccaaagtgctgagactgtttgaagagaatgatgtgaacctgacccacatagaaagcaggcctagcagactgaaaaaggatgagtatgagttcttcacccacctggacaaaagaagcctgcctgccctgaccaacatcatcaagatcctgagacatgacataggagccacagtgcatgagctgagcagagacaagaagaaggacacagtgccttggttccccaggaccatccaggagctggacagatttgccaaccagatcctgagctatggtgctgaacttgatgctgaccaccctggcttcaaggaccctgtgtacagggccagaagaaaacagtttgctgacatagcctacaactacagacacggccaacccatccccagagtggagtacatggaagaagagaaaaagacctggggcacagtgttcaagacactgaaaagcctgtacaagacccatgcctgctatgaatacaaccacatcttccctctactggaaaagtactgtggcttccacgaagataacatcccccagctggaagatgtgtcccagttcctgcagacctgcacaggcttcagactgcggccagttgctggcctgctgagcagcagagacttcctggggggcttggccttcagagtgttccactgcacccagtacatcagacacggcagcaagcccatgtacacccctgaaccagacatctgtcacgaactgctgggccatgtgcctctgttctctgacagaagctttgcccagttctcccaggagattggccttgccagccttggagcccctgatgaatacattgagaagctagccaccatctactggttcacagtggaatttggcctgtgtaagcagggagatagcatcaaggcctatggagctggcctgctgagcagctttggagagctgcaatactgcctgtctgagaagcctaaactgctccccctggaactggagaagacagccatccagaactacacagtgactgaattccagcccctgtactatgtggctgaatccttcaatgatgccaaggaaaaggtgagaaactttgctgccaccatcccaagaccattctctgtgaggtatgacccctacacccagagaattgaggtcctggacaacacccagcaattaaagatcctggcagactcaatcaactctgagattggcatcctgtgctctgccctgcagaaaatcaaatgaagatctgcctcgactgtgccttctagttgccagccatctgttgtttgcccctcccccgtgccttccttgaccctggaaggtgccactcccactgtcctttcctaataaaatgaggaaattgcatcgcattgtctgagtaggtgtcattctattctggggggtggggtggggcaggacagcaagggggaggattgggaagacaatagcaggcatgctggggatgcggtgggctctatggatcccctaactacaaggaacccctagtgatggagttggccactccctctctgcgcgctcgctcgctcactgaggccgggcgaccaaaggtcgcccgacgcccgggctttgcccgggcggcctcagtgagcgagcgagcgcgcagagagggagtggccaacaggaagctcctctgtgtcctcataaaccctaacctcctctacttgagaggacattccaatcataggctgcccatccaccctctgtgtcctcctgttaattaggtcacttaacaaaaaggaaattgggtaggggtttttcacagaccgctttctaagggtaattttaaaatatctgggaagtcccttccactgctgtgttccagaagtgttggtaaacagcccacaaatgtcaacagcagaaacatacaagctgtcagctttgcacaagggcccaatctctggaagatccgcgcgtaccgagttctaattcactggccgtcgttttacaacgtcgtgactgggaaaaccctggcgttacccaacttaatcgccttgcagcacatccccctttcgccagctggcgtaatagcgaagaggcccgcaccgatcgcccttcccaacagttgcgcagcctgaatggcgaatggcgcctgatgcggtattttctccttacgcatctgtgcggtatttcacaccgcatatggtgcactctcagtacaatctgctctgatgccgcatagttaagccagccccgacacccgccaacacccgctgacgcgccctgacgggcttgtctgctcccggcatccgcttacagacaagctgtgaccgtctccgggagctgcatgtgtcagaggttttcaccgtcatcaccgaaacgcgcgagacgaaagggcctcgtgatacgcctatttttataggttaatgtcatgataataatggtttcttagacgtcaggtggcacttttcggggaaatgtgcgcggaacccccatttgtttatttttctaaatacattcaaatatgtatccgctcatgagacaataaccctgataaatgcttcaataatattgaaaaaggaagagtatgagccatattcaacgggaaacgtcttgctctaggccgcgattaaattccaacatggatgctgatttatatgggtataaatgggctcgcgataatgtcgggcaatcaggtgcgacaatctatcgattgtatgggaagcccgatgcgccagagttgtttctgaaacatggcaaaggtagcgttgccaatgatgttacagatgagatggtcagactaaactggctgacggaatttatgcctcttccgaccatcaagcattttatccgtactcctgatgatgcatggttactcaccactgcgatccctgggaaaacagcattccaggtattagaagaatatcctgattcaggtgaaaatattgttgatgcgctggcagtgttcctgcgccggttgcattcgattcctgtttgtaattgtccttttaacagcgatcgcgtatttcgtctcgctcaggcgcaatcacgaatgaataacggtttggttgatgcgagtgattttgatgacgagcgtaatggctggcctgttgaacaagtctggaaagaaatgcataaacttttgccattctcaccggattcagtcgtcactcatggtgatttctcacttgataaccttatttttgacgaggggaaattaataggttgtattgatgttggacgagtcggaatcgcagaccgataccaggatcttgccatcctatggaactgcctcggtgagttttctccttcattacagaaacggctttttcaaaaatatggtattgataatcctgatatgaataaattgcagtttcatttgatgctcgatgagtttttctaaaagcttgtgcaatgccacaaagaagagtcaatcgcagacaacattttgaatgcggtcacacgttagcagcatgattgccacggatggcaacatattaacggcatgatattgacttattgaataaaattgggtaaatttgactcaacgatgggttaattcgctcgttgtggtagtgagatgaaaagaggcggcgcttactaccgattccgcctagttggtcacttcgacgtatcgtctggaactccaaccatcgcaggcagagaggtctgcaaaatgcaatcccgaaacagttcgcaggtaatagttagagcctgcataacggtttcgggattttttatatctgcacaacaggtaagagcattgagtcgataatcgtgaagagtcggcgagcctggttagccagtgctctttccgttgtgctgaattaagcgaataccggaagcagaaccggatcaccaaatgcgtacaggcgtcatcgccgcccagcaacagcacaacccaaactgagccgtagccactgtctgtcctgaattcattagtaatagttacgctgcggccttttacacatgaccttcgtgaaagcgggtggcaggaggtcgcgctaacaacctcctgccgttttgcccgtgcatatcggtcacgaacaaatctgattactaaacacagtagcctggatttgttctatcagtaatcgaccttattcctaattaaatagagcaaatccccttattgggggtaagacatgaagatgccagaaaaacatgacctgttggccgccattctcgcggcaaaggaacaaggcatcggggcaatccttgcgtttgcaatggcgtaccttcgcggcagatataatggcggtgcgtttacaaaaacagtaatcgacgcaacgatgtgcgccattatcgcctggttcattcgtgaccttctcgacttcgccggactaagtagcaatctcgcttatataacgagcgtgtttatcggctacatcggtactgactcgattggttcgcttatcaaacgcttcgctgctaaaaaagccggagtagaagatggtagaaatcaataatcaacgtaaggcgttcctcgatatgctggcgtggtcggagggaactgataacggacgtcagaaaaccagaaatcatggttatgacgtcattgtaggcggagagctatttactgattactccgatcaccctcgcaaacttgtcacgctaaacccaaaactcaaatcaacaggcgccggacgctaccagcttctttcccgttggtgggatgcctaccgcaagcagcttggcctgaaagacttctctccgaaaagtcaggacgctgtggcattgcagcagattaaggagcgtggcgctttacctatgattgatcgtggtgatatccgtcaggcaatcgaccgttgcagcaatatctgggcttcactgccgggcgctggttatggtcagttcgagcataaggctgacagcctgattgcaaaattcaaagaagcgggcggaacggtcagagagattgatgtatgagcagagtcaccgcgattatctccgctctggttatctgcatcatcgtctgcctgtcatgggctgttaatcattaccgtgataacgccattacctacaaagcccagcgcgacaaaaatgccagagaactgaagctggcgaacgcggcaattactgacatgcagatgcgtcagcgtgatgttgctgcgctcgatgcaaaatacacgaaggagttagctgatgctaaagctgaaaatgatgctctgcgtgatgatgttgccgctggtcgtcgtcggttgcacatcaaagcagtctgtcagtcagtgcgtgaagccaccaccgcctccggcgtggataatgcagcctccccccgactggcagacaccgctgaacgggattatttcaccctcagagagaggctgatcactatgcaaaaacaactggaaggaacccagaagtatattaatgagcagtgcagatagagttgcccatatcgatgggcaactcatgcaattattgtgagcaatacacacgcgcttccagcggagtataaatgcctaaagtaataaaaccgagcaatccatttacgaatgtttgctgggtttctgttttaacaacattttctgcgccgccacaaattttggctgcatcgacagttttcttctgcccaattccagaaacgaagaaatgatgggtgatggtttcctttggtgctactgctgccggtttgttttgaacagtaaacgtctgttgagcacatcctgtaataagcagggccagcgcagtagcgagtagcatttttttcatggtgttattcccgatgctttttgaagttcgcagaatcgtatgtgtagaaaattaaacaaaccctaaacaatgagttgaaatttcatattgttaatatttattaatgtatgtcaggtgcgatgaatcgtcattgtattcccggattaactatgtccacagccctgacggggaacttctctgcgggagtgtccgggaataattaaaacgatgcacacagggtttagcgcgtacacgtattgcattatgccaacgccccggtgctgacacggaagaaaccggacgttatgatttagcgtggaaagatttgtgtagtgttctgaatgctctcagtaaatagtaatgaattatcaaaggtatagtaatatcttttatgttcatggatatttgtaacccatcggaaaactcctgctttagcaagattttccctgtattgctgaaatgtgatttctcttgatttcaacctatcataggacgtttctataagatgcgtgtttcttgagaatttaacatttacaacctttttaagtccttttattaacacggtgttatcgttttctaacacgatgtgaatattatctgtggctagatagtaaatataatgtgagacgttgtgacgtttgctagcctgtcagaccaagtttactcatatatactttagattgatttaaaacttcatttttaatttaaaaggatctaggtgaagatcctttttgataatctcatgaccaaaatcccttaacgtgagttttcgttccactgagcgtcagaccccgtagaaaagatcaaaggatcttcttgagatcctttttttctgcgcgtaatctgctgcttgcaaacaaaaaaaccaccgctaccagcggtggtttgtttgccggatcaagagctaccaactctttttccgaaggtaactggcttcagcagagcgcagataccaaatactgttcttctagtgtagccgtagttaggccaccacttcaagaactctgtagcaccgcctacatacctcgctctgctaatcctgttaccagtggctgctgccagtggcgataagtcgtgtcttaccgggttggactcaagacgatagttaccggataaggcgcagcggtcgggctgaacggggggttcgtgcacacagcccagcttggagcgaacgacctacaccgaactgagatacctacagcgtgagctatgagaaagcgccacgcttcccgaagggagaaaggcggacaggtatccggtaagcggcagggtcggaacaggagagcgcacgagggagcttccagggggaaacgcctggtatctttatagtcctgtcgggtttcgccacctctgacttgagcgtcgatttttgtgatgctcgtcaggggggcggagcctatggaaaaacgccagcaacgcggcctttttacggttcctggccttttgctggccttttgctcacatgttctttcctgcgttatcccctgattctgtggataaccgtattaccgcctttgagtgagctgataccgctcgccgcagccgaacgaccgagcgcagcgagtcagtgagcgaggaagcggaagagcgcccaatacgcaaaccgcctctccccgcgcgttggccgattcattaatgcagctggcacgacaggtttcccgactggaaagcgggcagtgagcgcaacgcaattaatgtgagttagctcactcattaggcaccccaggctttacactttatgcttccggctcgtatgttgtgtggaattgtgagcggataacaatttcacacaggaaacagctatgaccatgattacgccaagtttgcacgcctgccgttcgacgatttcgcgagttggttcagctgctgcctgaggctggacgacctcgcggagttctaccggcagtgcaaatccgtcggcatccaggaaaccagcagcggctatccgcgcatccatgcccccgaactgcaggagtggggaggcacgatggccgctttggtccggatctttgtgaaggaaccttacttctgtggtgtgacataattggacaaactacctacagagatttaaagctctaaggtaaatataaaatttttaagtgtataatgtgttaaactactgattctaattgtttgtgtattttagattccaacctatggaactgatgaatgggagcagtggtggaatgcctttaatgaggaaaacctgttttgctcagaagaaatgccatctagtgatgatgaggctactgctgactctcaacattctactcctccaaaaaagaagagaaaggtagaagaccccaaggactttccttcagaattgctaagttttttgagtcatgctgtgtttagtaatagaactcttgcttgctttgctatttacaccacaaaggaaaaagctgcactgctatacaagaaaattatggaaaaatattctgtaacctttataagtaggcataacagttataatcataacatactgttttttcttactccacacaggcatagagtgt

SEQ ID NO: 106 - DNA, 9651 bp, synthetic construct
  source 1..9651: mol_type = other DNA
ctgctattaataactatgctcaaaaattgtgtacctttagctttttaatttgtaaaggggttaataaggaatatttgatgtatagtgccttgactagagatcataatcagccataccacatttgtagaggttttacttgctttaaaaaacctcccacacctccccctgaacctgaaacataaaatgaatgcaattgttgttgttctagcttggccactccctctctgcgcgctcgctcgctcactgaggccgggcgaccaaaggtcgcccgacgcccgggctttgcccgggcggcctcagtgagcgagcgagcgcgcagagagggagtggccaactccatcactaggggttcctctcgaggcggccgcaggctcagaggcacacaggagtttctgggctcaccctgcccccttccaacccctcagttcccatcctccagcagctgtttgtgtgctgcctctgaagtccacactgaacaaacttcagcctactcatgtccctaaaatgggcaaacattgcaagcagcaaacagcaaacacacagccctccctgcctgctgaccttggagctggggcagaggtcagagacctctctgggcccatgccacctccaacatccactcgaccccttggaatttcggtggagaggagcagaggttgtcctggcgtggtttaggtagtgtgagaggggtcgacgatcttgctaccagtggaacagccactaaggattctgcagtgagagcagagggccagctaagtggtactctcccagagactgtctgactcacgccaccccctccaccttggacacaggacgctgtggtttctgagccaggtacaatgactcctttcggtaagtgcagtggaagctgtacactgcccaggcaaagcgtccgggcagcgtaggcgggcgactcagatcccagccagtggacttagcccctgtttgctcctccgataactggggtgaccttggttaatattcaccagcagcctcccccgttgcccctctggatccactgcttaaatacggacgaggacagggccctgtctcctcagcttcaggcaccaccactgacctgggacagtgaatcgtaagtatgcctttcactgcgagaggttctggagaggcttctgagctccccatggcccaggcaggcagcaggtctggggcaggaggggggttgtggagtgggtatccgcctgctgaggtgcagggcagatcatcatgtgccttgactcggggcctggcccccccatctctgtcttgcaggacaattgccgtcttctgtctcgtggggcatcctcctgctggcaggcctgtgctgcctggtccctgtctccctggctgaggaccgggtaccgccaccatgtccacagctgtgctggaaaaccctggcctgggcagaaagctgagtgactttggccaagagacctcttacattgaggacaactgcaaccagaatggagccatctccctgatcttcagcctgaaggaggaagtgggagccctggccaaagtcctgaggctgtttgaagagaatgatgtgaacctgacccacattgagtccaggcccagcagactgaagaaggatgaatatgagttcttcacccacctggacaagagaagcctgccagccctgaccaacatcatcaagatcctgagacatgacattggagccacagtgcatgagctgagcagagacaagaaaaaggacacagtgccctggttcccaagaaccatccaggagctggacagatttgccaaccaaatcctgagctatggtgcagaactggatgctgaccaccctggcttcaaggacccagtgtacagagccagaagaaagcaatttgctgacatagcctacaattacaggcacggccagcctatccctagagtggaatacatggaggaggaaaagaagacctggggcacagtgttcaaaaccctgaagagcctgtacaaaacccacgcctgctatgagtacaaccacatcttccctctgctggagaagtactgtggcttccatgaggacaacatccctcagctggaagatgtgagccagttcctgcagacatgcacaggcttcagactgagacctgttgctggcctgctgagcagcagagacttcctggggggcctggccttcagagtcttccactgtacccagtacatcagacacggcagcaaacccatgtacacccctgagcctgacatctgccacgagctgctgggccatgtgcccctgttctctgacagaagctttgcccagttcagccaagaaataggcctggccagcctgggagcccctgatgagtacattgaaaagctggccaccatctactggttcacagtggagtttggcctgtgcaagcagggggacagcatcaaggcctatggagctggcctgctgagcagctttggagaactgcagtactgcctgtctgagaagcctaagctgctgcctctggaactggagaagactgccatccagaattacactgtgacagaattccagcccctgtactatgttgcagagagcttcaatgatgccaaggaaaaggtgaggaactttgctgccaccatccctaggcccttctctgtgagatatgacccttacacccagagaattgaggtgctggacaacacccagcagcttaagatcctggctgatagcatcaactctgagattggcatcctgtgctctgccctgcagaagatcaaatgaagatctgcctcgactgtgccttctagttgccagccatctgttgtttgcccctcccccgtgccttccttgaccctggaaggtgccactcccactgtcctttcctaataaaatgaggaaattgcatcgcattgtctgagtaggtgtcattctattctggggggtggggtggggcaggacagcaagggggaggattgggaagacaatagcaggcatgctggggatgcggtgggctctatggatcccctaactacaaggaacccctagtgatggagttggccactccctctctgcgcgctcgctcgctcactgaggccgggcgaccaaaggtcgcccgacgcccgggctttgcccgggcggcctcagtgagcgagcgagcgcgcagagagggagtggccaacaggaagctcctctgtgtcctcataaaccctaacctcctctacttgagaggacattccaatcataggctgcccatccaccctctgtgtcctcctgttaattaggtcacttaacaaaaaggaaattgggtaggggtttttcacagaccgctttctaagggtaattttaaaatatctgggaagtcccttccactgctgtgttccagaagtgttggtaaacagcccacaaatgtcaacagcagaaacatacaagctgtcagctttgcacaagggcccaatctctggaagatccgcgcgtaccgagttctaattcactggccgtcgttttacaacgtcgtgactgggaaaaccctggcgttacccaacttaatcgccttgcagcacatccccctttcgccagctggcgtaatagcgaagaggcccgcaccgatcgcccttcccaacagttgcgcagcctgaatggcgaatggcgcctgatgcggtattttctccttacgcatctgtgcggtatttcacaccgcatatggtgcactctcagtacaatctgctctgatgccgcatagttaagccagccccgacacccgccaacacccgctgacgcgccctgacgggcttgtctgctcccggcatccgcttacagacaagctgtgaccgtctccgggagctgcatgtgtcagaggttttcaccgtcatcaccgaaacgcgcgagacgaaagggcctcgtgatacgcctatttttataggttaatgtcatgataataatggtttcttagacgtcaggtggcacttttcggggaaatgtgcgcggaacccccatttgtttatttttctaaatacattcaaatatgtatccgctcatgagacaataaccctgataaatgcttcaataatattgaaaaaggaagagtatgagccatattcaacgggaaacgtcttgctctaggccgcgattaaattccaacatggatgctgatttatatgggtataaatgggctcgcgataatgtcgggcaatcaggtgcgacaatctatcgattgtatgggaagcccgatgcgccagagttgtttctgaaacatggcaaaggtagcgttgccaatgatgttacagatgagatggtcagactaaactggctgacggaatttatgcctcttccgaccatcaagcattttatccgtactcctgatgatgcatggttactcaccactgcgatccctgggaaaacagcattccaggtattagaagaatatcctgattcaggtgaaaatattgttgatgcgctggcagtgttcctgcgccggttgcattcgattcctgtttgtaattgtccttttaacagcgatcgcgtatttcgtctcgctcaggcgcaatcacgaatgaataacggtttggttgatgcgagtgattttgatgacgagcgtaatggctggcctgttgaacaagtctggaaagaaatgcataaacttttgccattctcaccggattcagtcgtcactcatggtgatttctcacttgataaccttatttttgacgaggggaaattaataggttgtattgatgttggacgagtcggaatcgcagaccgataccaggatcttgccatcctatggaactgcctcggtgagttttctccttcattacagaaacggctttttcaaaaatatggtattgataatcctgatatgaataaattgcagtttcatttgatgctcgatgagtttttctaaaagcttgtgcaatgccacaaagaagagtcaatcgcagacaacattttgaatgcggtcacacgttagcagcatgattgccacggatggcaacatattaacggcatgatattgacttattgaataaaattgggtaaatttgactcaacgatgggttaattcgctcgttgtggtagtgagatgaaaagaggcggcgcttactaccgattccgcctagttggtcacttcgacgtatcgtctggaactccaaccatcgcaggcagagaggtctgcaaaatgcaatcccgaaacagttcgcaggtaatagttagagcctgcataacggtttcgggattttttatatctgcacaacaggtaagagcattgagtcgataatcgtgaagagtcggcgagcctggttagccagtgctctttccgttgtgctgaattaagcgaataccggaagcagaaccggatcaccaaatgcgtacaggcgtcatcgccgcccagcaacagcacaacccaaactgagccgtagccactgtctgtcctgaattcattagtaatagttacgctgcggccttttacacatgaccttcgtgaaagcgggtggcaggaggtcgcgctaacaacctcctgccgttttgcccgtgcatatcggtcacgaacaaatctgattactaaacacagtagcctggatttgttctatcagtaatcgaccttattcctaattaaatagagcaaatccccttattgggggtaagacatgaagatgccagaaaaacatgacctgttggccgccattctcgcggcaaaggaacaaggcatcggggcaatccttgcgtttgcaatggcgtaccttcgcggcagatataatggcggtgcgtttacaaaaacagtaatcgacgcaacgatgtgcgccattatcgcctggttcattcgtgaccttctcgacttcgccggactaagtagcaatctcgcttatataacgagcgtgtttatcggctacatcggtactgactcgattggttcgcttatcaaacgcttcgctgctaaaaaagccggagtagaagatggtagaaatcaataatcaacgtaaggcgttcctcgatatgctggcgtggtcggagggaactgataacggacgtcagaaaaccagaaatcatggttatgacgtcattgtaggcggagagctatttactgattactccgatcaccctcgcaaacttgtcacgctaaacccaaaactcaaatcaacaggcgccggacgctaccagcttctttcccgttggtgggatgcctaccgcaagcagcttggcctgaaagacttctctccgaaaagtcaggacgctgtggcattgcagcagattaaggagcgtggcgctttacctatgattgatcgtggtgatatccgtcaggcaatcgaccgttgcagcaatatctgggcttcactgccgggcgctggttatggtcagttcgagcataaggctgacagcctgattgcaaaattcaaagaagcgggcggaacggtcagagagattgatgtatgagcagagtcaccgcgattatctccgctctggttatctgcatcatcgtctgcctgtcatgggctgttaatcattaccgtgataacgccattacctacaaagcccagcgcgacaaaaatgccagagaactgaagctggcgaacgcggcaattactgacatgcagatgcgtcagcgtgatgttgctgcgctcgatgcaaaatacacgaaggagttagctgatgctaaagctgaaaatgatgctctgcgtgatgatgttgccgctggtcgtcgtcggttgcacatcaaagcagtctgtcagtcagtgcgtgaagccaccaccgcctccggcgtggataatgcagcctccccccgactggcagacaccgctgaacgggattatttcaccctcagagagaggctgatcactatgcaaaaacaactggaaggaacccagaagtatattaatgagcagtgcagatagagttgcccatatcgatgggcaactcatgcaattattgtgagcaatacacacgcgcttccagcggagtataaatgcctaaagtaataaaaccgagcaatccatttacgaatgtttgctgggtttctgttttaacaacattttctgcgccgccacaaattttggctgcatcgacagttttcttctgcccaattccagaaacgaagaaatgatgggtgatggtttcctttggtgctactgctgccggtttgttttgaacagtaaacgtctgttgagcacatcctgtaataagcagggccagcgcagtagcgagtagcatttttttcatggtgttattcccgatgctttttgaagttcgcagaatcgtatgtgtagaaaattaaacaaaccctaaacaatgagttgaaatttcatattgttaatatttattaatgtatgtcaggtgcgatgaatcgtcattgtattcccggattaactatgtccacagccctgacggggaacttctctgcgggagtgtccgggaataattaaaacgatgcacacagggtttagcgcgtacacgtattgcattatgccaacgccccggtgctgacacggaagaaaccggacgttatgatttagcgtggaaagatttgtgtagtgttctgaatgctctcagtaaatagtaatgaattatcaaaggtatagtaatatcttttatgttcatggatatttgtaacccatcggaaaactcctgctttagcaagattttccctgtattgctgaaatgtgatttctcttgatttcaacctatcataggacgtttctataagatgcgtgtttcttgagaatttaacatttacaacctttttaagtccttttattaacacggtgttatcgttttctaacacgatgtgaatattatctgtggctagatagtaaatataatgtgagacgttgtgacgtttgctagcctgtcagaccaagtttactcatatatactttagattgatttaaaacttcatttttaatttaaaaggatctaggtgaagatcctttttgataatctcatgaccaaaatcccttaacgtgagttttcgttccactgagcgtcagaccccgtagaaaagatcaaaggatcttcttgagatcctttttttctgcgcgtaatctgctgcttgcaaacaaaaaaaccaccgctaccagcggtggtttgtttgccggatcaagagctaccaactctttttccgaaggtaactggcttcagcagagcgcagataccaaatactgttcttctagtgtagccgtagttaggccaccacttcaagaactctgtagcaccgcctacatacctcgctctgctaatcctgttaccagtggctgctgccagtggcgataagtcgtgtcttaccgggttggactcaagacgatagttaccggataaggcgcagcggtcgggctgaacggggggttcgtgcacacagcccagcttggagcgaacgacctacaccgaactgagatacctacagcgtgagctatgagaaagcgccacgcttcccgaagggagaaaggcggacaggtatccggtaagcggcagggtcggaacaggagagcgcacgagggagcttccagggggaaacgcctggtatctttatagtcctgtcgggtttcgccacctctgacttgagcgtcgatttttgtgatgctcgtcaggggggcggagcctatggaaaaacgccagcaacgcggcctttttacggttcctggccttttgctggccttttgctcacatgttctttcctgcgttatcccctgattctgtggataaccgtattaccgcctttgagtgagctgataccgctcgccgcagccgaacgaccgagcgcagcgagtcagtgagcgaggaagcggaagagcgcccaatacgcaaaccgcctctccccgcgcgttggccgattcattaatgcagctggcacgacaggtttcccgactggaaagcgggcagtgagcgcaacgcaattaatgtgagttagctcactcattaggcaccccaggctttacactttatgcttccggctcgtatgttgtgtggaattgtgagcggataacaatttcacacaggaaacagctatgaccatgattacgccaagtttgcacgcctgccgttcgacgatttcgcgagttggttcagctgctgcctgaggctggacgacctcgcggagttctaccggcagtgcaaatccgtcggcatccaggaaaccagcagcggctatccgcgcatccatgcccccgaactgcaggagtggggaggcacgatggccgctttggtccggatctttgtgaaggaaccttacttctgtggtgtgacataattggacaaactacctacagagatttaaagctctaaggtaaatataaaatttttaagtgtataatgtgttaaactactgattctaattgtttgtgtattttagattccaacctatggaactgatgaatgggagcagtggtggaatgcctttaatgaggaaaacctgttttgctcagaagaaatgccatctagtgatgatgaggctactgctgactctcaacattctactcctccaaaaaagaagagaaaggtagaagaccccaaggactttccttcagaattgctaagttttttgagtcatgctgtgtttagtaatagaactcttgcttgctttgctatttacaccacaaaggaaaaagctgcactgctatacaagaaaattatggaaaaatattctgtaacctttataagtaggcataacagttataatcataacatactgttttttcttactccacacaggcatagagtgt

SEQ ID NO: 107 - DNA, 9651 bp, synthetic construct
  source 1..9651: mol_type = other DNA
ctgctattaataactatgctcaaaaattgtgtacctttagctttttaatttgtaaaggggttaataaggaatatttgatgtatagtgccttgactagagatcataatcagccataccacatttgtagaggttttacttgctttaaaaaacctcccacacctccccctgaacctgaaacataaaatgaatgcaattgttgttgttctagcttggccactccctctctgcgcgctcgctcgctcactgaggccgggcgaccaaaggtcgcccgacgcccgggctttgcccgggcggcctcagtgagcgagcgagcgcgcagagagggagtggccaactccatcactaggggttcctctcgaggcggccgcaggctcagaggcacacaggagtttctgggctcaccctgcccccttccaacccctcagttcccatcctccagcagctgtttgtgtgctgcctctgaagtccacactgaacaaacttcagcctactcatgtccctaaaatgggcaaacattgcaagcagcaaacagcaaacacacagccctccctgcctgctgaccttggagctggggcagaggtcagagacctctctgggcccatgccacctccaacatccactcgaccccttggaatttcggtggagaggagcagaggttgtcctggcgtggtttaggtagtgtgagaggggtcgacgatcttgctaccagtggaacagccactaaggattctgcagtgagagcagagggccagctaagtggtactctcccagagactgtctgactcacgccaccccctccaccttggacacaggacgctgtggtttctgagccaggtacaatgactcctttcggtaagtgcagtggaagctgtacactgcccaggcaaagcgtccgggcagcgtaggcgggcgactcagatcccagccagtggacttagcccctgtttgctcctccgataactggggtgaccttggttaatattcaccagcagcctcccccgttgcccctctggatccactgcttaaatacggacgaggacagggccctgtctcctcagcttcaggcaccaccactgacctgggacagtgaatcgtaagtatgcctttcactgcgagaggttctggagaggcttctgagctccccatggcccaggcaggcagcaggtctggggcaggaggggggttgtggagtgggtatccgcctgctgaggtgcagggcagatcatcatgtgccttgactcggggcctggcccccccatctctgtcttgcaggacaattgccgtcttctgtctcgtggggcatcctcctgctggcaggcctgtgctgcctggtccctgtctccctggctgaggaccgggtaccgccaccatgtccacagctgtgctggagaaccctggcctgggcagaaagctgagtgactttggccaggagaccagctacattgaggacaactgtaaccagaatggggccatcagcctgatcttcagcctgaaggaggaagtgggagcattggccaaggtgctgagactgtttgaagaaaatgatgtcaacctgacccacatagagagcagacctagcaggttaaagaaggatgagtatgaattcttcacccacctggacaaaagaagcctgccagccctgaccaacatcatcaagatcttgagacatgacattggtgccacagtgcatgagctgagcagagacaagaagaaggacacagtcccctggttccctagaaccatccaggagctggacagatttgccaaccagatcctcagctatggagctgagctggatgctgatcaccctggcttcaaggacccagtgtacagagccagaagaaagcagtttgctgacatagcctacaactacagacacggccagcccatccctagagttgagtacatggaggaggaaaaaaagacctggggcactgtgttcaagaccctcaagagcctgtacaagacccatgcctgttatgaatacaaccacatcttccccctgctggagaaatactgtggcttccatgaagacaacatccctcagctggaagatgtcagccagttcctgcagacctgcacaggcttcagactgagacctgtggctggcctgctgagctctagagacttcctgggaggcctggccttcagagtgttccactgcacccaatacatcagacatggcagcaagcccatgtacaccccagaacctgacatctgccacgagctgctgggccatgtgcccctgttctctgacaggagctttgcccaattctctcaggagataggcctggcctccctgggtgcccctgatgagtacattgaaaagctagccaccatctactggttcacagtggaatttggcctgtgcaaacagggagacagcatcaaggcctatggagctggcctgctgagctcatttggagaactgcagtactgcctgtctgagaagcctaagctgctgcccctggaactggagaaaacagccatccagaactacacagtgactgagttccagcccctgtactatgtggctgaaagcttcaatgatgccaaggagaaggtgagaaactttgctgccaccatccccaggcctttctctgtgagatatgacccttacacacaaagaattgaggtgctggacaatacccagcagctgaaaatcctggctgacagcatcaactctgagattggcatcctgtgctctgccctgcagaagatcaaatgaagatctgcctcgactgtgccttctagttgccagccatctgttgtttgcccctcccccgtgccttccttgaccctggaaggtgccactcccactgtcctttcctaataaaatgaggaaattgcatcgcattgtctgagtaggtgtcattctattctggggggtggggtggggcaggacagcaagggggaggattgggaagacaatagcaggcatgctggggatgcggtgggctctatggatcccctaactacaaggaacccctagtgatggagttggccactccctctctgcgcgctcgctcgctcactgaggccgggcgaccaaaggtcgcccgacgcccgggctttgcccgggcggcctcagtgagcgagcgagcgcgcagagagggagtggccaacaggaagctcctctgtgtcctcataaaccctaacctcctctacttgagaggacattccaatcataggctgcccatccaccctctgtgtcctcctgttaattaggtcacttaacaaaaaggaaattgggtaggggtttttcacagaccgctttctaagggtaattttaaaatatctgggaagtcccttccactgctgtgttccagaagtgttggtaaacagcccacaaatgtcaacagcagaaacatacaagctgtcagctttgcacaagggcccaatctctggaagatccgcgcgtaccgagttctaattcactggccgtcgttttacaacgtcgtgactgggaaaaccctggcgttacccaacttaatcgccttgcagcacatccccctttcgccagctggcgtaatagcgaagaggcccgcaccgatcgcccttcccaacagttgcgcagcctgaatggcgaatggcgcctgatgcggtattttctccttacgcatctgtgcggtatttcacaccgcatatggtgcactctcagtacaatctgctctgatgccgcatagttaagccagccccgacacccgccaacacccgctgacgcgccctgacgggcttgtctgctcccggcatccgcttacagacaagctgtgaccgtctccgggagctgcatgtgtcagaggttttcaccgtcatcaccgaaacgcgcgagacgaaagggcctcgtgatacgcctatttttataggttaatgtcatgataataatggtttcttagacgtcaggtggcacttttcggggaaatgtgcgcggaacccccatttgtttatttttctaaatacattcaaatatgtatccgctcatgagacaataaccctgataaatgcttcaataatattgaaaaaggaagagtatgagccatattcaacgggaaacgtcttgctctaggccgcgattaaattccaacatggatgctgatttatatgggtataaatgggctcgcgataatgtcgggcaatcaggtgcgacaatctatcgattgtatgggaagcccgatgcgccagagttgtttctgaaacatggcaaaggtagcgttgccaatgatgttacagatgagatggtcagactaaactggctgacggaatttatgcctcttccgaccatcaagcattttatccgtactcctgatgatgcatggttactcaccactgcgatccctgggaaaacagcattccaggtattagaagaatatcctgattcaggtgaaaatattgttgatgcgctggcagtgttcctgcgccggttgcattcgattcctgtttgtaattgtccttttaacagcgatcgcgtatttcgtctcgctcaggcgcaatcacgaatgaataacggtttggttgatgcgagtgattttgatgacgagcgtaatggctggcctgttgaacaagtctggaaagaaatgcataaacttttgccattctcaccggattcagtcgtcactcatggtgatttctcacttgataaccttatttttgacgaggggaaattaataggttgtattgatgttggacgagtcggaatcgcagaccgataccaggatcttgccatcctatggaactgcctcggtgagttttctccttcattacagaaacggctttttcaaaaatatggtattgataatcctgatatgaataaattgcagtttcatttgatgctcgatgagtttttctaaaagcttgtgcaatgccacaaagaagagtcaatcgcagacaacattttgaatgcggtcacacgttagcagcatgattgccacggatggcaacatattaacggcatgatattgacttattgaataaaattgggtaaatttgactcaacgatgggttaattcgctcgttgtggtagtgagatgaaaagaggcggcgcttactaccgattccgcctagttggtcacttcgacgtatcgtctggaactccaaccatcgcaggcagagaggtctgcaaaatgcaatcccgaaacagttcgcaggtaatagttagagcctgcataacggtttcgggattttttatatctgcacaacaggtaagagcattgagtcgataatcgtgaagagtcggcgagcctggttagccagtgctctttccgttgtgctgaattaagcgaataccggaagcagaaccggatcaccaaatgcgtacaggcgtcatcgccgcccagcaacagcacaacccaaactgagccgtagccactgtctgtcctgaattcattagtaatagttacgctgcggccttttacacatgaccttcgtgaaagcgggtggcaggaggtcgcgctaacaacctcctgccgttttgcccgtgcatatcggtcacgaacaaatctgattactaaacacagtagcctggatttgttctatcagtaatcgaccttattcctaattaaatagagcaaatccccttattgggggtaagacatgaagatgccagaaaaacatgacctgttggccgccattctcgcggcaaaggaacaaggcatcggggcaatccttgcgtttgcaatggcgtaccttcgcggcagatataatggcggtgcgtttacaaaaacagtaatcgacgcaacgatgtgcgccattatcgcctggttcattcgtgaccttctcgacttcgccggactaagtagcaatctcgcttatataacgagcgtgtttatcggctacatcggtactgactcgattggttcgcttatcaaacgcttcgctgctaaaaaagccggagtagaagatggtagaaatcaataatcaacgtaaggcgttcctcgatatgctggcgtggtcggagggaactgataacggacgtcagaaaaccagaaatcatggttatgacgtcattgtaggcggagagctatttactgattactccgatcaccctcgcaaacttgtcacgctaaacccaaaactcaaatcaacaggcgccggacgctaccagcttctttcccgttggtgggatgcctaccgcaagcagcttggcctgaaagacttctctccgaaaagtcaggacgctgtggcattgcagcagattaaggagcgtggcgctttacctatgattgatcgtggtgatatccgtcaggcaatcgaccgttgcagcaatatctgggcttcactgccgggcgctggttatggtcagttcgagcataaggctgacagcctgattgcaaaattcaaagaagcgggcggaacggtcagagagattgatgtatgagcagagtcaccgcgattatctccgctctggttatctgcatcatcgtctgcctgtcatgggctgttaatcattaccgtgataacgccattacctacaaagcccagcgcgacaaaaatgccagagaactgaagctggcgaacgcggcaattactgacatgcagatgcgtcagcgtgatgttgctgcgctcgatgcaaaatacacgaaggagttagctgatgctaaagctgaaaatgatgctctgcgtgatgatgttgccgctggtcgtcgtcggttgcacatcaaagcagtctgtcagtcagtgcgtgaagccaccaccgcctccggcgtggataatgcagcctccccccgactggcagacaccgctgaacgggattatttcaccctcagagagaggctgatcactatgcaaaaacaactggaaggaacccagaagtatattaatgagcagtgcagatagagttgcccatatcgatgggcaactcatgcaattattgtgagcaatacacacgcgcttccagcggagtataaatgcctaaagtaataaaaccgagcaatccatttacgaatgtttgctgggtttctgttttaacaacattttctgcgccgccacaaattttggctgcatcgacagttttcttctgcccaattccagaaacgaagaaatgatgggtgatggtttcctttggtgctactgctgccggtttgttttgaacagtaaacgtctgttgagcacatcctgtaataagcagggccagcgcagtagcgagtagcatttttttcatggtgttattcccgatgctttttgaagttcgcagaatcgtatgtgtagaaaattaaacaaaccctaaacaatgagttgaaatttcatattgttaatatttattaatgtatgtcaggtgcgatgaatcgtcattgtattcccggattaactatgtccacagccctgacggggaacttctctgcgggagtgtccgggaataattaaaacgatgcacacagggtttagcgcgtacacgtattgcattatgccaacgccccggtgctgacacggaagaaaccggacgttatgatttagcgtggaaagatttgtgtagtgttctgaatgctctcagtaaatagtaatgaattatcaaaggtatagtaatatcttttatgttcatggatatttgtaacccatcggaaaactcctgctttagcaagattttccctgtattgctgaaatgtgatttctcttgatttcaacctatcataggacgtttctataagatgcgtgtttcttgagaatttaacatttacaacctttttaagtccttttattaacacggtgttatcgttttctaacacgatgtgaatattatctgtggctagatagtaaatataatgtgagacgttgtgacgtttgctagcctgtcagaccaagtttactcatatatactttagattgatttaaaacttcatttttaatttaaaaggatctaggtgaagatcctttttgataatctcatgaccaaaatcccttaacgtgagttttcgttccactgagcgtcagaccccgtagaaaagatcaaaggatcttcttgagatcctttttttctgcgcgtaatctgctgcttgcaaacaaaaaaaccaccgctaccagcggtggtttgtttgccggatcaagagctaccaactctttttccgaaggtaactggcttcagcagagcgcagataccaaatactgttcttctagtgtagccgtagttaggccaccacttcaagaactctgtagcaccgcctacatacctcgctctgctaatcctgttaccagtggctgctgccagtggcgataagtcgtgtcttaccgggttggactcaagacgatagttaccggataaggcgcagcggtcgggctgaacggggggttcgtgcacacagcccagcttggagcgaacgacctacaccgaactgagatacctacagcgtgagctatgagaaagcgccacgcttcccgaagggagaaaggcggacaggtatccggtaagcggcagggtcggaacaggagagcgcacgagggagcttccagggggaaacgcctggtatctttatagtcctgtcgggtttcgccacctctgacttgagcgtcgatttttgtgatgctcgtcaggggggcggagcctatggaaaaacgccagcaacgcggcctttttacggttcctggccttttgctggccttttgctcacatgttctttcctgcgttatcccctgattctgtggataaccgtattaccgcctttgagtgagctgataccgctcgccgcagccgaacgaccgagcgcagcgagtcagtgagcgaggaagcggaagagcgcccaatacgcaaaccgcctctccccgcgcgttggccgattcattaatgcagctggcacgacaggtttcccgactggaaagcgggcagtgagcgcaacgcaattaatgtgagttagctcactcattaggcaccccaggctttacactttatgcttccggctcgtatgttgtgtggaattgtgagcggataacaatttcacacaggaaacagctatgaccatgattacgccaagtttgcacgcctgccgttcgacgatttcgcgagttggttcagctgctgcctgaggctggacgacctcgcggagttctaccggcagtgcaaatccgtcggcatccaggaaaccagcagcggctatccgcgcatccatgcccccgaactgcaggagtggggaggcacgatggccgctttggtccggatctttgtgaaggaaccttacttctgtggtgtgacataattggacaaactacctacagagatttaaagctctaaggtaaatataaaatttttaagtgtataatgtgttaaactactgattctaattgtttgtgtattttagattccaacctatggaactgatgaatgggagcagtggtggaatgcctttaatgaggaaaacctgttttgctcagaagaaatgccatctagtgatgatgaggctactgctgactctcaacattctactcctccaaaaaagaagagaaaggtagaagaccccaaggactttccttcagaattgctaagttttttgagtcatgctgtgtttagtaatagaactcttgcttgctttgctatttacaccacaaaggaaaaagctgcactgctatacaagaaaattatggaaaaatattctgtaacctttataagtaggcataacagttataatcataacatactgttttttcttactccacacaggcatagagtgt

SEQ ID NO: 108 - DNA, 9651 bp, synthetic construct
  source 1..9651: mol_type = other DNA
ctgctattaataactatgctcaaaaattgtgtacctttagctttttaatttgtaaaggggttaataaggaatatttgatgtatagtgccttgactagagatcataatcagccataccacatttgtagaggttttacttgctttaaaaaacctcccacacctccccctgaacctgaaacataaaatgaatgcaattgttgttgttctagcttggccactccctctctgcgcgctcgctcgctcactgaggccgggcgaccaaaggtcgcccgacgcccgggctttgcccgggcggcctcagtgagcgagcgagcgcgcagagagggagtggccaactccatcactaggggttcctctcgaggcggccgcaggctcagaggcacacaggagtttctgggctcaccctgcccccttccaacccctcagttcccatcctccagcagctgtttgtgtgctgcctctgaagtccacactgaacaaacttcagcctactcatgtccctaaaatgggcaaacattgcaagcagcaaacagcaaacacacagccctccctgcctgctgaccttggagctggggcagaggtcagagacctctctgggcccatgccacctccaacatccactcgaccccttggaatttcggtggagaggagcagaggttgtcctggcgtggtttaggtagtgtgagaggggtcgacgatcttgctaccagtggaacagccactaaggattctgcagtgagagcagagggccagctaagtggtactctcccagagactgtctgactcacgccaccccctccaccttggacacaggacgctgtggtttctgagccaggtacaatgactcctttcggtaagtgcagtggaagctgtacactgcccaggcaaagcgtccgggcagcgtaggcgggcgactcagatcccagccagtggacttagcccctgtttgctcctccgataactggggtgaccttggttaatattcaccagcagcctcccccgttgcccctctggatccactgcttaaatacggacgaggacagggccctgtctcctcagcttcaggcaccaccactgacctgggacagtgaatcgtaagtatgcctttcactgcgagaggttctggagaggcttctgagctccccatggcccaggcaggcagcaggtctggggcaggaggggggttgtggagtgggtatccgcctgctgaggtgcagggcagatcatcatgtgccttgactcggggcctggcccccccatctctgtcttgcaggacaattgccgtcttctgtctcgtggggcatcctcctgctggcaggcctgtgctgcctggtccctgtctccctggctgaggaccgggtaccgccaccatgtccacagctgtgctggagaaccctggcctgggcagaaagctgagtgactttggccaggagaccagctacatagaagacaactgcaatcagaatggagccatcagcctcatcttcagcctgaaggaggaagtgggagccctggccaaagtgctgagactgtttgaggaaaatgatgtcaacctgacccacattgagagcagacccagcagactgaaaaaggatgagtatgagttcttcacccacctggacaagagaagcctgcctgccctcaccaacatcatcaaaatcctgagacatgacattggagccacagtgcatgaactgtccagagataaaaagaaagacacagtcccctggttccctaggaccatccaggagctggacagatttgccaaccagatcctgtcttatggagcagaactggatgctgaccaccctggcttcaaggaccctgtgtacagggccagaagaaagcagtttgctgacatagcctacaactacagacatggccaacccatccccagagttgaatacatggaggaggaaaagaagacctggggcacagtcttcaagaccctgaaaagcctgtacaagacccacgcctgctatgagtacaaccacatcttccccctgctggaaaagtactgtggcttccacgaggacaacatccctcagctggaggatgtgagccagttcctgcagacctgcacaggcttcagactcagacctgttgctggcctgctgagtagcagagacttcctgggaggcttggccttcagagtgttccactgcacccagtacatcagacacggcagcaagcccatgtacaccccagagcctgacatctgtcatgaactgttaggccatgtgcctctgttctctgaccggagctttgcccaattcagccaggaaattggcctggccagcctgggagccccagatgaatacattgagaagctggccacaatctactggttcacagtggaatttggcctgtgtaagcagggtgacagcatcaaagcctatggtgctggcctgctgagcagctttggagagctgcagtactgcctgtctgaaaagcctaaactgctgcctttggagctggagaagacagccatccagaactacacagtgactgagttccagcccctgtactatgtggctgagagcttcaatgatgccaaggagaaggtgaggaactttgctgccaccatccctagacctttctctgtgagatatgacccctacacccagaggattgaggtgctggacaacacacagcagctgaagatccttgctgacagcatcaactctgagattggcatcctgtgctctgccctgcaaaagatcaagtgaagatctgcctcgactgtgccttctagttgccagccatctgttgtttgcccctcccccgtgccttccttgaccctggaaggtgccactcccactgtcctttcctaataaaatgaggaaattgcatcgcattgtctgagtaggtgtcattctattctggggggtggggtggggcaggacagcaagggggaggattgggaagacaatagcaggcatgctggggatgcggtgggctctatggatcccctaactacaaggaacccctagtgatggagttggccactccctctctgcgcgctcgctcgctcactgaggccgggcgaccaaaggtcgcccgacgcccgggctttgcccgggcggcctcagtgagcgagcgagcgcgcagagagggagtggccaacaggaagctcctctgtgtcctcataaaccctaacctcctctacttgagaggacattccaatcataggctgcccatccaccctctgtgtcctcctgttaattaggtcacttaacaaaaaggaaattgggtaggggtttttcacagaccgctttctaagggtaattttaaaatatctgggaagtcccttccactgctgtgttccagaagtgttggtaaacagcccacaaatgtcaacagcagaaacatacaagctgtcagctttgcacaagggcccaatctctggaagatccgcgcgtaccgagttctaattcactggccgtcgttttacaacgtcgtgactgggaaaaccctggcgttacccaacttaatcgccttgcagcacatccccctttcgccagctggcgtaatagcgaagaggcccgcaccgatcgcccttcccaacagttgcgcagcctgaatggcgaatggcgcctgatgcggtattttctccttacgcatctgtgcggtatttcacaccgcatatggtgcactctcagtacaatctgctctgatgccgcatagttaagccagccccgacacccgccaacacccgctgacgcgccctgacgggcttgtctgctcccggcatccgcttacagacaagctgtgaccgtctccgggagctgcatgtgtcagaggttttcaccgtcatcaccgaaacgcgcgagacgaaagggcctcgtgatacgcctatttttataggttaatgtcatgataataatggtttcttagacgtcaggtggcacttttcggggaaatgtgcgcggaacccccatttgtttatttttctaaatacattcaaatatgtatccgctcatgagacaataaccctgataaatgcttcaataatattgaaaaaggaagagtatgagccatattcaacgggaaacgtcttgctctaggccgcgattaaattccaacatggatgctgatttatatgggtataaatgggctcgcgataatgtcgggcaatcaggtgcgacaatctatcgattgtatgggaagcccgatgcgccagagttgtttctgaaacatggcaaaggtagcgttgccaatgatgttacagatgagatggtcagactaaactggctgacggaatttatgcctcttccgaccatcaagcattttatccgtactcctgatgatgcatggttactcaccactgcgatccctgggaaaacagcattccaggtattagaagaatatcctgattcaggtgaaaatattgttgatgcgctggcagtgttcctgcgccggttgcattcgattcctgtttgtaattgtccttttaacagcgatcgcgtatttcgtctcgctcaggcgcaatcacgaatgaataacggtttggttgatgcgagtgattttgatgacgagcgtaatggctggcctgttgaacaagtctggaaagaaatgcataaacttttgccattctcaccggattcagtcgtcactcatggtgatttctcacttgataaccttatttttgacgaggggaaattaataggttgtattgatgttggacgagtcggaatcgcagaccgataccaggatcttgccatcctatggaactgcctcggtgagttttctccttcattacagaaacggctttttcaaaaatatggtattgataatcctgatatgaataaattgcagtttcatttgatgctcgatgagtttttctaaaagcttgtgcaatgccacaaagaagagtcaatcgcagacaacattttgaatgcggtcacacgttagcagcatgattgccacggatggcaacatattaacggcatgatattgacttattgaataaaattgggtaaatttgactcaacgatgggttaattcgctcgttgtggtagtgagatgaaaagaggcggcgcttactaccgattccgcctagttggtcacttcgacgtatcgtctggaactccaaccatcgcaggcagagaggtctgcaaaatgcaatcccgaaacagttcgcaggtaatagttagagcctgcataacggtttcgggattttttatatctgcacaacaggtaagagcattgagtcgataatcgtgaagagtcggcgagcctggttagccagtgctctttccgttgtgctgaattaagcgaataccggaagcagaaccggatcaccaaatgcgtacaggcgtcatcgccgcccagcaacagcacaacccaaactgagccgtagccactgtctgtcctgaattcattagtaatagttacgctgcggccttttacacatgaccttcgtgaaagcgggtggcaggaggtcgcgctaacaacctcctgccgttttgcccgtgcatatcggtcacgaacaaatctgattactaaacacagtagcctggatttgttctatcagtaatcgaccttattcctaattaaatagagcaaatccccttattgggggtaagacatgaagatgccagaaaaacatgacctgttggccgccattctcgcggcaaaggaacaaggcatcggggcaatccttgcgtttgcaatggcgtaccttcgcggcagatataatggcggtgcgtttacaaaaacagtaatcgacgcaacgatgtgcgccattatcgcctggttcattcgtgaccttctcgacttcgccggactaagtagcaatctcgcttatataacgagcgtgtttatcggctacatcggtactgactcgattggttcgcttatcaaacgcttcgctgctaaaaaagccggagtagaagatggtagaaatcaataatcaacgtaaggcgttcctcgatatgctggcgtggtcggagggaactgataacggacgtcagaaaaccagaaatcatggttatgacgtcattgtaggcggagagctatttactgattactccgatcaccctcgcaaacttgtcacgctaaacccaaaactcaaatcaacaggcgccggacgctaccagcttctttcccgttggtgggatgcctaccgcaagcagcttggcctgaaagacttctctccgaaaagtcaggacgctgtggcattgcagcagattaaggagcgtggcgctttacctatgattgatcgtggtgatatccgtcaggcaatcgaccgttgcagcaatatctgggcttcactgccgggcgctggttatggtcagttcgagcataaggctgacagcctgattgcaaaattcaaagaagcgggcggaacggtcagagagattgatgtatgagcagagtcaccgcgattatctccgctctggttatctgcatcatcgtctgcctgtcatgggctgttaatcattaccgtgataacgccattacctacaaagcccagcgcgacaaaaatgccagagaactgaagctggcgaacgcggcaattactgacatgcagatgcgtcagcgtgatgttgctgcgctcgatgcaaaatacacgaaggagttagctgatgctaaagctgaaaatgatgctctgcgtgatgatgttgccgctggtcgtcgtcggttgcacatcaaagcagtctgtcagtcagtgcgtgaagccaccaccgcctccggcgtggataatgcagcctccccccgactggcagacaccgctgaacgggattatttcaccctcagagagaggctgatcactatgcaaaaacaactggaaggaacccagaagtatattaatgagcagtgcagatagagttgcccatatcgatgggcaactcatgcaattattgtgagcaatacacacgcgcttccagcggagtataaatgcctaaagtaataaaaccgagcaatccatttacgaatgtttgctgggtttctgttttaacaacattttctgcgccgccacaaattttggctgcatcgacagttttcttctgcccaattccagaaacgaagaaatgatgggtgatggtttcctttggtgctactgctgccggtttgttttgaacagtaaacgtctgttgagcacatcctgtaataagcagggccagcgcagtagcgagtagcatttttttcatggtgttattcccgatgctttttgaagttcgcagaatcgtatgtgtagaaaattaaacaaaccctaaacaatgagttgaaatttcatattgttaatatttattaatgtatgtcaggtgcgatgaatcgtcattgtattcccggattaactatgtccacagccctgacggggaacttctctgcgggagtgtccgggaataattaaaacgatgcacacagggtttagcgcgtacacgtattgcattatgccaacgccccggtgctgacacggaagaaaccggacgttatgatttagcgtggaaagatttgtgtagtgttctgaatgctctcagtaaatagtaatgaattatcaaaggtatagtaatatcttttatgttcatggatatttgtaacccatcggaaaactcctgctttagcaagattttccctgtattgctgaaatgtgatttctcttgatttcaacctatcataggacgtttctataagatgcgtgtttcttgagaatttaacatttacaacctttttaagtccttttattaacacggtgttatcgttttctaacacgatgtgaatattatctgtggctagatagtaaatataatgtgagacgttgtgacgtttgctagcctgtcagaccaagtttactcatatatactttagattgatttaaaacttcatttttaatttaaaaggatctaggtgaagatcctttttgataatctcatgaccaaaatcccttaacgtgagttttcgttccactgagcgtcagaccccgtagaaaagatcaaaggatcttcttgagatcctttttttctgcgcgtaatctgctgcttgcaaacaaaaaaaccaccgctaccagcggtggtttgtttgccggatcaagagctaccaactctttttccgaaggtaactggcttcagcagagcgcagataccaaatactgttcttctagtgtagccgtagttaggccaccacttcaagaactctgtagcaccgcctacatacctcgctctgctaatcctgttaccagtggctgctgccagtggcgataagtcgtgtcttaccgggttggactcaagacgatagttaccggataaggcgcagcggtcgggctgaacggggggttcgtgcacacagcccagcttggagcgaacgacctacaccgaactgagatacctacagcgtgagctatgagaaagcgccacgcttcccgaagggagaaaggcggacaggtatccggtaagcggcagggtcggaacaggagagcgcacgagggagcttccagggggaaacgcctggtatctttatagtcctgtcgggtttcgccacctctgacttgagcgtcgatttttgtgatgctcgtcaggggggcggagcctatggaaaaacgccagcaacgcggcctttttacggttcctggccttttgctggccttttgctcacatgttctttcctgcgttatcccctgattctgtggataaccgtattaccgcctttgagtgagctgataccgctcgccgcagccgaacgaccgagcgcagcgagtcagtgagcgaggaagcggaagagcgcccaatacgcaaaccgcctctccccgcgcgttggccgattcattaatgcagctggcacgacaggtttcccgactggaaagcgggcagtgagcgcaacgcaattaatgtgagttagctcactcattaggcaccccaggctttacactttatgcttccggctcgtatgttgtgtggaattgtgagcggataacaatttcacacaggaaacagctatgaccatgattacgccaagtttgcacgcctgccgttcgacgatttcgcgagttggttcagctgctgcctgaggctggacgacctcgcggagttctaccggcagtgcaaatccgtcggcatccaggaaaccagcagcggctatccgcgcatccatgcccccgaactgcaggagtggggaggcacgatggccgctttggtccggatctttgtgaaggaaccttacttctgtggtgtgacataattggacaaactacctacagagatttaaagctctaaggtaaatataaaatttttaagtgtataatgtgttaaactactgattctaattgtttgtgtattttagattccaacctatggaactgatgaatgggagcagtggtggaatgcctttaatgaggaaaacctgttttgctcagaagaaatgccatctagtgatgatgaggctactgctgactctcaacattctactcctccaaaaaagaagagaaaggtagaagaccccaaggactttccttcagaattgctaagttttttgagtcatgctgtgtttagtaatagaactcttgcttgctttgctatttacaccacaaaggaaaaagctgcactgctatacaagaaaattatggaaaaatattctgtaacctttataagtaggcataacagttataatcataacatactgttttttcttactccacacaggcatagagtgt

SEQ ID NO: 109 - DNA, 9651 bp, synthetic construct
  source 1..9651: mol_type = other DNA
ctgctattaataactatgctcaaaaattgtgtacctttagctttttaatttgtaaaggggttaataaggaatatttgatgtatagtgccttgactagagatcataatcagccataccacatttgtagaggttttacttgctttaaaaaacctcccacacctccccctgaacctgaaacataaaatgaatgcaattgttgttgttctagcttggccactccctctctgcgcgctcgctcgctcactgaggccgggcgaccaaaggtcgcccgacgcccgggctttgcccgggcggcctcagtgagcgagcgagcgcgcagagagggagtggccaactccatcactaggggttcctctcgaggcggccgcaggctcagaggcacacaggagtttctgggctcaccctgcccccttccaacccctcagttcccatcctccagcagctgtttgtgtgctgcctctgaagtccacactgaacaaacttcagcctactcatgtccctaaaatgggcaaacattgcaagcagcaaacagcaaacacacagccctccctgcctgctgaccttggagctggggcagaggtcagagacctctctgggcccatgccacctccaacatccactcgaccccttggaatttcggtggagaggagcagaggttgtcctggcgtggtttaggtagtgtgagaggggtcgacgatcttgctaccagtggaacagccactaaggattctgcagtgagagcagagggccagctaagtggtactctcccagagactgtctgactcacgccaccccctccaccttggacacaggacgctgtggtttctgagccaggtacaatgactcctttcggtaagtgcagtggaagctgtacactgcccaggcaaagcgtccgggcagcgtaggcgggcgactcagatcccagccagtggacttagcccctgtttgctcctccgataactggggtgaccttggttaatattcaccagcagcctcccccgttgcccctctggatccactgcttaaatacggacgaggacagggccctgtctcctcagcttcaggcaccaccactgacctgggacagtgaatcgtaagtatgcctttcactgcgagaggttctggagaggcttctgagctccccatggcccaggcaggcagcaggtctggggcaggaggggggttgtggagtgggtatccgcctgctgaggtgcagggcagatcatcatgtgccttgactcggggcctggcccccccatctctgtcttgcaggacaattgccgtcttctgtctcgtggggcatcctcctgctggcaggcctgtgctgcctggtccctgtctccctggctgaggaccgggtaccgccaccatgagcacagctgtcctggagaaccctggcctgggcaggaagctgtctgactttggccaggagacctcttacattgaggataactgcaaccagaatggagccatcagcctgatcttctcccttaaggaagaggtgggagctctggccaaagtgctcagactgtttgaagagaatgatgtgaacctgacccacattgagagcagacctagcaggctgaagaaagatgaatatgaattcttcacccacttggacaagagaagcctccctgccctgaccaacatcatcaaaatcctgaggcatgacataggagccactgttcatgagctcagcagagacaagaagaaagacacagtcccctggttcccaagaaccatccaggagctggacagatttgccaaccagatcctgagctatggggctgaactggatgctgaccaccctggcttcaaggaccctgtgtacagggccagaagaaagcagtttgctgacattgcctacaactacagacatggccaacccatccctagagtggaatacatggaggaagagaagaagacctggggcacagtgttcaaaaccctcaagagcctgtacaagacccacgcatgctatgagtacaaccacatcttccctctgctggagaagtactgtggcttccatgaggacaacatcccccagctggaggatgtgtcccagttcctgcagacctgtacaggcttcaggctgagacctgtggctggcctgctgagctccagagacttcctgggaggcctggccttcagagttttccactgcacccagtacatcagacacggctccaagcccatgtacacccctgaacctgacatctgccatgagctgctgggccacgtccccctgttctctgacagaagctttgcccagttcagccaagaaattggcctggccagcctgggtgcccctgatgagtacattgagaagctggccacaatctactggttcacagtggaatttggcctgtgcaagcagggagactccatcaaggcctatggtgctggcctgctgagcagctttggagagctgcagtactgcctgtcagaaaaacctaagctcctgcctctggagctggaaaaaacagccatccaaaactacacagtgacagagttccagcccctgtactatgtggctgagagcttcaatgatgccaaggagaaggtgaggaactttgcagccaccatccccagacctttctctgtgagatatgacccctacacccagagaatagaggtgctggataacacccagcaactgaagatcctggcagacagcatcaactctgagattggcatcctgtgctctgccctgcagaagatcaagtgaagatctgcctcgactgtgccttctagttgccagccatctgttgtttgcccctcccccgtgccttccttgaccctggaaggtgccactcccactgtcctttcctaataaaatgaggaaattgcatcgcattgtctgagtaggtgtcattctattctggggggtggggtggggcaggacagcaagggggaggattgggaagacaatagcaggcatgctggggatgcggtgggctctatggatcccctaactacaaggaacccctagtgatggagttggccactccctctctgcgcgctcgctcgctcactgaggccgggcgaccaaaggtcgcccgacgcccgggctttgcccgggcggcctcagtgagcgagcgagcgcgcagagagggagtggccaacaggaagctcctctgtgtcctcataaaccctaacctcctctacttgagaggacattccaatcataggctgcccatccaccctctgtgtcctcctgttaattaggtcacttaacaaaaaggaaattgggtaggggtttttcacagaccgctttctaagggtaattttaaaatatctgggaagtcccttccactgctgtgttccagaagtgttggtaaacagcccacaaatgtcaacagcagaaacatacaagctgtcagctttgcacaagggcccaatctctggaagatccgcgcgtaccgagttctaattcactggccgtcgttttacaacgtcgtgactgggaaaaccctggcgttacccaacttaatcgccttgcagcacatccccctttcgccagctggcgtaatagcgaagaggcccgcaccgatcgcccttcccaacagttgcgcagcctgaatggcgaatggcgcctgatgcggtattttctccttacgcatctgtgcggtatttcacaccgcatatggtgcactctcagtacaatctgctctgatgccgcatagttaagccagccccgacacccgccaacacccgctgacgcgccctgacgggcttgtctgctcccggcatccgcttacagacaagctgtgaccgtctccgggagctgcatgtgtcagaggttttcaccgtcatcaccgaaacgcgcgagacgaaagggcctcgtgatacgcctatttttataggttaatgtcatgataataatggtttcttagacgtcaggtggcacttttcggggaaatgtgcgcggaacccccatttgtttatttttctaaatacattcaaatatgtatccgctcatgagacaataaccctgataaatgcttcaataatattgaaaaaggaagagtatgagccatattcaacgggaaacgtcttgctctaggccgcgattaaattccaacatggatgctgatttatatgggtataaatgggctcgcgataatgtcgggcaatcaggtgcgacaatctatcgattgtatgggaagcccgatgcgccagagttgtttctgaaacatggcaaaggtagcgttgccaatgatgttacagatgagatggtcagactaaactggctgacggaatttatgcctcttccgaccatcaagcattttatccgtactcctgatgatgcatggttactcaccactgcgatccctgggaaaacagcattccaggtattagaagaatatcctgattcaggtgaaaatattgttgatgcgctggcagtgttcctgcgccggttgcattcgattcctgtttgtaattgtccttttaacagcgatcgcgtatttcgtctcgctcaggcgcaatcacgaatgaataacggtttggttgatgcgagtgattttgatgacgagcgtaatggctggcctgttgaacaagtctggaaagaaatgcataaacttttgccattctcaccggattcagtcgtcactcatggtgatttctcacttgataaccttatttttgacgaggggaaattaataggttgtattgatgttggacgagtcggaatcgcagaccgataccaggatcttgccatcctatggaactgcctcggtgagttttctccttcattacagaaacggctttttcaaaaatatggtattgataatcctgatatgaataaattgcagtttcatttgatgctcgatgagtttttctaaaagcttgtgcaatgccacaaagaagagtcaatcgcagacaacattttgaatgcggtcacacgttagcagcatgattgccacggatggcaacatattaacggcatgatattgacttattgaataaaattgggtaaatttgactcaacgatgggttaattcgctcgttgtggtagtgagatgaaaagaggcggcgcttactaccgattccgcctagttggtcacttcgacgtatcgtctggaactccaaccatcgcaggcagagaggtctgcaaaatgcaatcccgaaacagttcgcaggtaatagttagagcctgcataacggtttcgggattttttatatctgcacaacaggtaagagcattgagtcgataatcgtgaagagtcggcgagcctggttagccagtgctctttccgttgtgctgaattaagcgaataccggaagcagaaccggatcaccaaatgcgtacaggcgtcatcgccgcccagcaacagcacaacccaaactgagccgtagccactgtctgtcctgaattcattagtaatagttacgctgcggccttttacacatgaccttcgtgaaagcgggtggcaggaggtcgcgctaacaacctcctgccgttttgcccgtgcatatcggtcacgaacaaatctgattactaaacacagtagcctggatttgttctatcagtaatcgaccttattcctaattaaatagagcaaatccccttattgggggtaagacatgaagatgccagaaaaacatgacctgttggccgccattctcgcggcaaaggaacaaggcatcggggcaatccttgcgtttgcaatggcgtaccttcgcggcagatataatggcggtgcgtttacaaaaacagtaatcgacgcaacgatgtgcgccattatcgcctggttcattcgtgaccttctcgacttcgccggactaagtagcaatctcgcttatataacgagcgtgtttatcggctacatcggtactgactcgattggttcgcttatcaaacgcttcgctgctaaaaaagccggagtagaagatggtagaaatcaataatcaacgtaaggcgttcctcgatatgctggcgtggtcggagggaactgataacggacgtcagaaaaccagaaatcatggttatgacgtcattgtaggcggagagctatttactgattactccgatcaccctcgcaaacttgtcacgctaaacccaaaactcaaatcaacaggcgccggacgctaccagcttctttcccgttggtgggatgcctaccgcaagcagcttggcctgaaagacttctctccgaaaagtcaggacgctgtggcattgcagcagattaaggagcgtggcgctttacctatgattgatcgtggtgatatccgtcaggcaatcgaccgttgcagcaatatctgggcttcactgccgggcgctggttatggtcagttcgagcataaggctgacagcctgattgcaaaattcaaagaagcgggcggaacggtcagagagattgatgtatgagcagagtcaccgcgattatctccgctctggttatctgcatcatcgtctgcctgtcatgggctgttaatcattaccgtgataacgccattacctacaaagcccagcgcgacaaaaatgccagagaactgaagctggcgaacgcggcaattactgacatgcagatgcgtcagcgtgatgttgctgcgctcgatgcaaaatacacgaaggagttagctgatgctaaagctgaaaatgatgctctgcgtgatgatgttgccgctggtcgtcgtcggttgcacatcaaagcagtctgtcagtcagtgcgtgaagccaccaccgcctccggcgtggataatgcagcctccccccgactggcagacaccgctgaacgggattatttcaccctcagagagaggctgatcactatgcaaaaacaactggaaggaacccagaagtatattaatgagcagtgcagatagagttgcccatatcgatgggcaactcatgcaattattgtgagcaatacacacgcgcttccagcggagtataaatgcctaaagtaataaaaccgagcaatccatttacgaatgtttgctgggtttctgttttaacaacattttctgcgccgccacaaattttggctgcatcgacagttttcttctgcccaattccagaaacgaagaaatgatgggtgatggtttcctttggtgctactgctgccggtttgttttgaacagtaaacgtctgttgagcacatcctgtaataagcagggccagcgcagtagcgagtagcatttttttcatggtgttattcccgatgctttttgaagttcgcagaatcgtatgtgtagaaaattaaacaaaccctaaacaatgagttgaaatttcatattgttaatatttattaatgtatgtcaggtgcgatgaatcgtcattgtattcccggattaactatgtccacagccctgacggggaacttctctgcgggagtgtccgggaataattaaaacgatgcacacagggtttagcgcgtacacgtattgcattatgccaacgccccggtgctgacacggaagaaaccggacgttatgatttagcgtggaaagatttgtgtagtgttctgaatgctctcagtaaatagtaatgaattatcaaaggtatagtaatatcttttatgttcatggatatttgtaacccatcggaaaactcctgctttagcaagattttccctgtattgctgaaatgtgatttctcttgatttcaacctatcataggacgtttctataagatgcgtgtttcttgagaatttaacatttacaacctttttaagtccttttattaacacggtgttatcgttttctaacacgatgtgaatattatctgtggctagatagtaaatataatgtgagacgttgtgacgtttgctagcctgtcagaccaagtttactcatatatactttagattgatttaaaacttcatttttaatttaaaaggatctaggtgaagatcctttttgataatctcatgaccaaaatcccttaacgtgagttttcgttccactgagcgtcagaccccgtagaaaagatcaaaggatcttcttgagatcctttttttctgcgcgtaatctgctgcttgcaaacaaaaaaaccaccgctaccagcggtggtttgtttgccggatcaagagctaccaactctttttccgaaggtaactggcttcagcagagcgcagataccaaatactgttcttctagtgtagccgtagttaggccaccacttcaagaactctgtagcaccgcctacatacctcgctctgctaatcctgttaccagtggctgctgccagtggcgataagtcgtgtcttaccgggttggactcaagacgatagttaccggataaggcgcagcggtcgggctgaacggggggttcgtgcacacagcccagcttggagcgaacgacctacaccgaactgagatacctacagcgtgagctatgagaaagcgccacgcttcccgaagggagaaaggcggacaggtatccggtaagcggcagggtcggaacaggagagcgcacgagggagcttccagggggaaacgcctggtatctttatagtcctgtcgggtttcgccacctctgacttgagcgtcgatttttgtgatgctcgtcaggggggcggagcctatggaaaaacgccagcaacgcggcctttttacggttcctggccttttgctggccttttgctcacatgttctttcctgcgttatcccctgattctgtggataaccgtattaccgcctttgagtgagctgataccgctcgccgcagccgaacgaccgagcgcagcgagtcagtgagcgaggaagcggaagagcgcccaatacgcaaaccgcctctccccgcgcgttggccgattcattaatgcagctggcacgacaggtttcccgactggaaagcgggcagtgagcgcaacgcaattaatgtgagttagctcactcattaggcaccccaggctttacactttatgcttccggctcgtatgttgtgtggaattgtgagcggataacaatttcacacaggaaacagctatgaccatgattacgccaagtttgcacgcctgccgttcgacgatttcgcgagttggttcagctgctgcctgaggctggacgacctcgcggagttctaccggcagtgcaaatccgtcggcatccaggaaaccagcagcggctatccgcgcatccatgcccccgaactgcaggagtggggaggcacgatggccgctttggtccggatctttgtgaaggaaccttacttctgtggtgtgacataattggacaaactacctacagagatttaaagctctaaggtaaatataaaatttttaagtgtataatgtgttaaactactgattctaattgtttgtgtattttagattccaacctatggaactgatgaatgggagcagtggtggaatgcctttaatgaggaaaacctgttttgctcagaagaaatgccatctagtgatgatgaggctactgctgactctcaacattctactcctccaaaaaagaagagaaaggtagaagaccccaaggactttccttcagaattgctaagttttttgagtcatgctgtgtttagtaatagaactcttgcttgctttgctatttacaccacaaaggaaaaagctgcactgctatacaagaaaattatggaaaaatattctgtaacctttataagtaggcataacagttataatcataacatactgttttttcttactccacacaggcatagagtgt

SEQ ID NO: 110 - DNA, 7291 bp, synthetic construct
  source 1..7291: mol_type = other DNA
atgccggggttttacgagattgtgattaaggtccccagcgaccttgacgagcatctgcccggcatttctgacagctttgtgaactgggtggccgagaaggaatgggagttgccgccagattctgacatggatctgaatctgattgagcaggcacccctgaccgtggccgagaagctgcagcgcgactttctgacggaatggcgccgtgtgagtaaggccccggaggcccttttctttgtgcaatttgagaagggagagagctacttccacatgcacgtgctcgtggaaaccaccggggtgaaatccatggttttgggacgtttcctgagtcagattcgcgaaaaactgattcagagaatttaccgcgggatcgagccgactttgccaaactggttcgcggtcacaaagaccagaaatggcgccggaggcgggaacaaggtggtggatgagtgctacatccccaattacttgctccccaaaacccagcctgagctccagtgggcgtggactaatatggaacagtatttaagcgcctgtttgaatctcacggagcgtaaacggttggtggcgcagcatctgacgcacgtgtcgcagacgcaggagcagaacaaagagaatcagaatcccaattctgatgcgccggtgatcagatcaaaaacttcagccaggtacatggagctggtcgggtggctcgtggacaaggggattacctcggagaagcagtggatccaggaggaccaggcctcatacatctccttcaatgcggcctccaactcgcggtcccaaatcaaggctgccttggacaatgcgggaaagattatgagcctgactaaaaccgcccccgactacctggtgggccagcagcccgtggaggacatttccagcaatcggatttataaaattttggaactaaacgggtacgatccccaatatgcggcttccgtctttctgggatgggccacgaaaaagttcggcaagaggaacaccatctggctgtttgggcctgcaactaccgggaagaccaacatcgcggaggccatagcccacactgtgcccttctacgggtgcgtaaactggaccaatgagaactttcccttcaacgactgtgtcgacaagatggtgatctggtgggaggaggggaagatgaccgccaaggtcgtggagtcggccaaagccattctcggaggaagcaaggtgcgcgtggaccagaaatgcaagtcctcggcccagatagacccgactcccgtgatcgtcacctccaacaccaacatgtgcgccgtgattgacgggaactcaacgaccttcgaacaccagcagccgttgcaagaccggatgttcaaatttgaactcacccgccgtctggatcatgactttgggaaggtcaccaagcaggaagtcaaagactttttccggtgggcaaaggatcacgtggttgaggtggagcatgaattctacgtcaaaaagggtggagccaagaaaagacccgcccccagtgacgcagatataagtgagcccaaacgggtgcgcgagtcagttgcgcagccatcgacgtcagacgcggaagcttcgatcaactacgcagacaggtaccaaaacaaatgttctcgtcacgtgggcatgaatctgatgctgtttccctgcagacaatgcgagagaatgaatcagaattcaaatatctgcttcactcacggacagaaagactgtttagagtgctttcccgtgtcagaatctcaacccgtttctgtcgtcaaaaaggcgtatcagaaactgtgctacattcatcatatcatgggaaaggtgccagacgcttgcactgcctgcgatctggtcaatgtggatttggatgactgcatctttgaacaataaatgatttaaatcaggtatggctgccgatggttatcttccagattggctcgaggacaacctctctgagggcattcgcgagtggtgggcgctgaaacctggagccccgaagcccaaagccaaccagcaaaagcaggacgacggccggggtctggtgcttcctggctacaagtacctcggacccttcaacggactcgacaagggggagcccgtcaacgcggcggacgcagcggccctcgagcacgacaaggcctacgaccagcagctgcaggcgggtgacaatccgtacctgcggtataaccacgccgacgccgagtttcaggagcgtctgcaagaagatacgtcttttgggggcaacctcgggcgagcagtcttccaggccaagaagcgggttctcgaacctctcggtctggttgaggaaggcgctaagacggctcctggaaagaagagaccggtagagccatcaccccagcgttctccagactcctctacgggcatcggcaagaaaggccaacagcccgccagaaaaagactcaattttggtcagactggcgactcagagtcagttccagaccctcaacctctcggagaacctccagcagcgccctctggtgtgggacctaatacaatggctgcaggcggtggcgcaccaatggcagacaataacgaaggcgccgacggagtgggtagttcctcgggaaattggcattgcgattccacatggctgggcgacagagtcatcaccaccagcacccgaacctgggccctgcccacctacaacaaccacctctacaagcaaatctccaacgggacatcgggaggagccaccaacgacaacacctacttcggctacagcaccccctgggggtattttgactttaacagattccactgccacttttcaccacgtgactggcagcgactcatcaacaacaactggggattccggcccaagagactcagcttcaagctcttcaacatccaggtcaaggaggtcacgcagaatgaaggcaccaagaccatcgccaataacctcaccagcaccatccaggtgtttacggactcggagtaccagctgccgtacgttctcggctctgcccaccagggctgcctgcctccgttcccggcggacgtgttcatgattccccagtacggctacctaacactcaacaacggtagtcaggccgtgggacgctcctccttctactgcctggaatactttccttcgcagatgctgagaaccggcaacaacttccagtttacttacaccttcgaggacgtgcctttccacagcagctacgcccacagccagagcttggaccggctgatgaatcctctgattgaccagtacctgtactacttgtctcggactcaaacaacaggaggcacggcaaatacgcagactctgggcttcagccaaggtgggcctaatacaatggccaatcaggcaaagaactggctgccaggaccctgttaccgccaacaacgcgtctcaacgacaaccgggcaaaacaacaatagcaactttgcctggactgctgggaccaaataccatctgaatggaagaaattcattggctaatcctggcatcgctatggcaacacacaaagacgacgaggagcgtttttttcccagtaacgggatcctgatttttggcaaacaaaatgctgccagagacaatgcggattacagcgatgtcatgctcaccagcgaggaagaaatcaaaaccactaaccctgtggctacagaggaatacggtatcgtggcagataacttgcagcagcaaaacacggctcctcaaattggaactgtcaacagccagggggccttacccggtatggtctggcagaaccgggacgtgtacctgcagggtcccatctgggccaagattcctcacacggacggcaacttccacccgtctccgctgatgggcggctttggcctgaaacatcctccgcctcagatcctgatcaagaacacgcctgtacctgcggatcctccgaccaccttcaaccagtcaaagctgaactctttcatcacgcaatacagcaccggacaggtcagcgtggaaattgaatgggagctgcagaaggaaaacagcaagcgctggaaccccgagatccagtacacctccaactactacaaatctacaagtgtggactttgctgttaatacagaaggcgtgtactctgaaccccgccccattggcacccgttacctcacccgtaatctgtaattgcttgttaatcaataaaccgtttaattcgtttcagttgaactttggtctctgcgaagggcgaattcgtttaaacctgcaggactagaggtcctgtattagaggtcacgtgagtgttttgcgacattttgcgacaccatgtggtcacgctgggtatttaagcccgagtgagcacgcagggtctccattttgaagcgggaggtttgaacgcgcagccgccaagccgaattctgcagatatccatcacactggcggccgctcgactagagcggccgccaccgcggtggagctccagcttttgttccctttagtgagggttaattgcgcgcttggcgtaatcatggtcatagctgtttcctgtgtgaaattgttatccgctcacaattccacacaacatacgagccggaagcataaagtgtaaagcctggggtgcctaatgagtgagctaactcacattaattgcgttgcgctcactgcccgctttccagtcgggaaacctgtcgtgccagctgcattaatgaatcggccaacgcgcggggagaggcggtttgcgtattgggcgctcttccgcttcctcgctcactgactcgctgcgctcggtcgttcggctgcggcgagcggtatcagctcactcaaaggcggtaatacggttatccacagaatcaggggataacgcaggaaagaacatgtgagcaaaaggccagcaaaaggccaggaaccgtaaaaaggccgcgttgctggcgtttttccataggctccgcccccctgacgagcatcacaaaaatcgacgctcaagtcagaggtggcgaaacccgacaggactataaagataccaggcgtttccccctggaagctccctcgtgcgctctcctgttccgaccctgccgcttaccggatacctgtccgcctttctcccttcgggaagcgtggcgctttctcatagctcacgctgtaggtatctcagttcggtgtaggtcgttcgctccaagctgggctgtgtgcacgaaccccccgttcagcccgaccgctgcgccttatccggtaactatcgtcttgagtccaacccggtaagacacgacttatcgccactggcagcagccactggtaacaggattagcagagcgaggtatgtaggcggtgctacagagttcttgaagtggtggcctaactacggctacactagaagaacagtatttggtatctgcgctctgctgaagccagttaccttcggaaaaagagttggtagctcttgatccggcaaacaaaccaccgctggtagcggtggtttttttgtttgcaagcagcagattacgcgcagaaaaaaaggatctcaagaagatcctttgatcttttctacggggtctgacgctcagtggaacgaaaactcacgttaagggattttggtcatgagattatcaaaaaggatcttcacctagatccttttaaattaaaaatgaagttttaaatcaatctaaagtatatatgagtaaacttggtctgacagttagaaaaactcatcgagcatcaaatgaaactgcaatttattcatatcaggattatcaataccatatttttgaaaaagccgtttctgtaatgaaggagaaaactcaccgaggcagttccataggatggcaagatcctggtatcggtctgcgattccgactcgtccaacatcaatacaacctattaatttcccctcgtcaaaaataaggttatcaagtgagaaatcaccatgagtgacgactgaatccggtgagaatggcaaaagtttatgcatttctttccagacttgttcaacaggccagccattacgctcgtcatcaaaatcactcgcatcaaccaaaccgttattcattcgtgattgcgcctgagcgagacgaaatacgcgatcgctgttaaaaggacaattacaaacaggaatcgaatgcaaccggcgcaggaacactgccagcgcatcaacaatattttcacctgaatcaggatattcttctaatacctggaatgctgttttcccagggatcgcagtggtgagtaaccatgcatcatcaggagtacggataaaatgcttgatggtcggaagaggcataaattccgtcagccagtttagtctgaccatctcatctgtaacatcattggcaacgctacctttgccatgtttcagaaacaactctggcgcatcgggcttcccatacaatcgatagattgtcgcacctgattgcccgacattatcgcgagcccatttatacccatataaatcagcatccatgttggaatttaatcgcggcctagagcaagacgtttcccgttgaatatggctcatactcttcctttttcaatattattgaagcatttatcagggttattgtctcatgagcggatacatatttgaatgtatttagaaaaataaacaaataggggttccgcgcacatttccccgaaaagtgccacctaaattgtaagcgttaatattttgttaaaattcgcgttaaatttttgttaaatcagctcattttttaaccaataggccgaaatcggcaaaatcccttataaatcaaaagaatagaccgagatagggttgagtgttgttccagtttggaacaagagtccactattaaagaacgtggactccaacgtcaaagggcgaaaaaccgtctatcagggcgatggcccactacgtgaaccatcaccctaatcaagttttttggggtcgaggtgccgtaaagcactaaatcggaaccctaaagggagcccccgatttagagcttgacggggaaagccggcgaacgtggcgagaaaggaagggaagaaagcgaaaggagcgggcgctagggcgctggcaagtgtagcggtcacgctgcgcgtaaccaccacacccgccgcgcttaatgcgccgctacagggcgcgtcccattcgccattcaggctgcgcaactgttgggaagggcgatcggtgcgggcctcttcgctattacgccagctggcgaaagggggatgtgctgcaaggcgattaagttgggtaacgccagggttttcccagtcacgacgttgtaaaacgacggccagtgagcgcgcgtaatacgactcactatagggcgaattgggtaccgggccccccctcgatcgaggtcgacggtatcgggggagctcgcagggtctccattttgaagcgggaggtttgaacgcgcagccgcc

SEQ ID NO: 111 - DNA, 11590 bp, synthetic construct
  source 1..11590: mol_type = other DNA
ggtacccaactccatgcttaacagtccccaggtacagcccaccctgcgtcgcaaccaggaacagctctacagcttcctggagcgccactcgccctacttccgcagccacagtgcgcagattaggagcgccacttctttttgtcacttgaaaaacatgtaaaaataatgtactaggagacactttcaataaaggcaaatgtttttatttgtacactctcgggtgattatttaccccccacccttgccgtctgcgccgtttaaaaatcaaaggggttctgccgcgcatcgctatgcgccactggcagggacacgttgcgatactggtgtttagtgctccacttaaactcaggcacaaccatccgcggcagctcggtgaagttttcactccacaggctgcgcaccatcaccaacgcgtttagcaggtcgggcgccgatatcttgaagtcgcagttggggcctccgccctgcgcgcgcgagttgcgatacacagggttgcagcactggaacactatcagcgccgggtggtgcacgctggccagcacgctcttgtcggagatcagatccgcgtccaggtcctccgcgttgctcagggcgaacggagtcaactttggtagctgccttcccaaaaagggtgcatgcccaggctttgagttgcactcgcaccgtagtggcatcagaaggtgaccgtgcccggtctgggcgttaggatacagcgcctgcatgaaagccttgatctgcttaaaagccacctgagcctttgcgccttcagagaagaacatgccgcaagacttgccggaaaactgattggccggacaggccgcgtcatgcacgcagcaccttgcgtcggtgttggagatctgcaccacatttcggccccaccggttcttcacgatcttggccttgctagactgctccttcagcgcgcgctgcccgttttcgctcgtcacatccatttcaatcacgtgctccttatttatcataatgctcccgtgtagacacttaagctcgccttcgatctcagcgcagcggtgcagccacaacgcgcagcccgtgggctcgtggtgcttgtaggttacctctgcaaacgactgcaggtacgcctgcaggaatcgccccatcatcgtcacaaaggtcttgttgctggtgaaggtcagctgcaacccgcggtgctcctcgtttagccaggtcttgcatacggccgccagagcttccacttggtcaggcagtagcttgaagtttgcctttagatcgttatccacgtggtacttgtccatcaacgcgcgcgcagcctccatgcccttctcccacgcagacacgatcggcaggctcagcgggtttatcaccgtgctttcactttccgcttcactggactcttccttttcctcttgcgtccgcataccccgcgccactgggtcgtcttcattcagccgccgcaccgtgcgcttacctcccttgccgtgcttgattagcaccggtgggttgctgaaacccaccatttgtagcgccacatcttctctttcttcctcgctgtccacgatcacctctggggatggcgggcgctcgggcttgggagaggggcgcttctttttctttttggacgcaatggccaaatccgccgtcgaggtcgatggccgcgggctgggtgtgcgcggcaccagcgcatcttgtgacgagtcttcttcgtcctcggactcgagacgccgcctcagccgcttttttgggggcgcgcggggaggcggcggcgacggcgacggggacgacacgtcctccatggttggtggacgtcgcgccgcaccgcgtccgcgctcgggggtggtttcgcgctgctcctcttcccgactggccatttccttctcctataggcagaaaaagatcatggagtcagtcgagaaggaggacagcctaaccgccccctttgagttcgccaccaccgcctccaccgatgccgccaacgcgcctaccaccttccccgtcgaggcacccccgcttgaggaggaggaagtgattatcgagcaggacccaggttttgtaagcgaagacgacgaggatcgctcagtaccaacagaggataaaaagcaagaccaggacgacgcagaggcaaacgaggaacaagtcgggcggggggaccaaaggcatggcgactacctagatgtgggagacgacgtgctgttgaagcatctgcagcgccagtgcgccattatctgcgacgcgttgcaagagcgcagcgatgtgcccctcgccatagcggatgtcagccttgcctacgaacgccacctgttctcaccgcgcgtaccccccaaacgccaagaaaacggcacatgcgagcccaacccgcgcctcaacttctaccccgtatttgccgtgccagaggtgcttgccacctatcacatctttttccaaaactgcaagatacccctatcctgccgtgccaaccgcagccgagcggacaagcagctggccttgcggcagggcgctgtcatacctgatatcgcctcgctcgacgaagtgccaaaaatctttgagggtcttggacgcgacgagaaacgcgcggcaaacgctctgcaacaagaaaacagcgaaaatgaaagtcactgtggagtgctggtggaacttgagggtgacaacgcgcgcctagccgtgctgaaacgcagcatcgaggtcacccactttgcctacccggcacttaacctaccccccaaggttatgagcacagtcatgagcgagctgatcgtgcgccgtgcacgacccctggagagggatgcaaacttgcaagaacaaaccgaggagggcctacccgcagttggcgatgagcagctggcgcgctggcttgagacgcgcgagcctgccgacttggaggagcgacgcaagctaatgatggccgcagtgcttgttaccgtggagcttgagtgcatgcagcggttctttgctgacccggagatgcagcgcaagctagaggaaacgttgcactacacctttcgccagggctacgtgcgccaggcctgcaaaatttccaacgtggagctctgcaacctggtctcctaccttggaattttgcacgaaaaccgcctcgggcaaaacgtgcttcattccacgctcaagggcgaggcgcgccgcgactacgtccgcgactgcgtttacttatttctgtgctacacctggcaaacggccatgggcgtgtggcagcaatgcctggaggagcgcaacctaaaggagctgcagaagctgctaaagcaaaacttgaaggacctatggacggccttcaacgagcgctccgtggccgcgcacctggcggacattatcttccccgaacgcctgcttaaaaccctgcaacagggtctgccagacttcaccagtcaaagcatgttgcaaaactttaggaactttatcctagagcgttcaggaattctgcccgccacctgctgtgcgcttcctagcgactttgtgcccattaagtaccgtgaatgccctccgccgctttggggtcactgctaccttctgcagctagccaactaccttgcctaccactccgacatcatggaagacgtgagcggtgacggcctactggagtgtcactgtcgctgcaacctatgcaccccgcaccgctccctggtctgcaattcgcaactgcttagcgaaagtcaaattatcggtacctttgagctgcagggtccctcgcctgacgaaaagtccgcggctccggggttgaaactcactccggggctgtggacgtcggcttaccttcgcaaatttgtacctgaggactaccacgcccacgagattaggttctacgaagaccaatcccgcccgccaaatgcggagcttaccgcctgcgtcattacccagggccacatccttggccaattgcaagccatcaacaaagcccgccaagagtttctgctacgaaagggacggggggtttacctggacccccagtccggcgaggagctcaacccaatccccccgccgccgcagccctatcagcagccgcgggcccttgcttcccaggatggcacccaaaaagaagctgcagctgccgccgccgccacccacggacgaggaggaatactgggacagtcaggcagaggaggttttggacgaggaggaggagatgatggaagactgggacagcctagacgaagcttccgaggccgaagaggtgtcagacgaaacaccgtcaccctcggtcgcattcccctcgccggcgccccagaaattggcaaccgttcccagcatcgctacaacctccgctcctcaggcgccgccggcactgcctgttcgccgacccaaccgtagatgggacaccactggaaccagggccggtaagtctaagcagccgccgccgttagcccaagagcaacaacagcgccaaggctaccgctcgtggcgcgggcacaagaacgccatagttgcttgcttgcaagactgtgggggcaacatctccttcgcccgccgctttcttctctaccatcacggcgtggccttcccccgtaacatcctgcattactaccgtcatctctacagcccctactgcaccggcggcagcggcagcggcagcaacagcagcggtcacacagaagcaaaggcgaccggatagcaagactctgacaaagcccaagaaatccacagcggcggcagcagcaggaggaggagcgctgcgtctggcgcccaacgaacccgtatcgacccgcgagcttagaaataggatttttcccactctgtatgctatatttcaacaaagcaggggccaagaacaagagctgaaaataaaaaacaggtctctgcgctccctcacccgcagctgcctgtatcacaaaagcgaagatcagcttcggcgcacgctggaagacgcggaggctctcttcagcaaatactgcgcgctgactcttaaggactagtttcgcgccctttctcaaatttaagcgcgaaaactacgtcatctccagcggccacacccggcgccagcacctgtcgtcagcgccattatgagcaaggaaattcccacgccctacatgtggagttaccagccacaaatgggacttgcggctggagctgcccaagactactcaacccgaataaactacatgagcgcgggaccccacatgatatcccgggtcaacggaatccgcgcccaccgaaaccgaattctcctcgaacaggcggctattaccaccacacctcgtaataaccttaatccccgtagttggcccgctgccctggtgtaccaggaaagtcccgctcccaccactgtggtacttcccagagacgcccaggccgaagttcagatgactaactcaggggcgcagcttgcgggcggctttcgtcacagggtgcggtcgcccgggcgttttagggcggagtaacttgcatgtattgggaattgtagtttttttaaaatgggaagtgacgtatcgtgggaaaacggaagtgaagatttgaggaagttgtgggttttttggctttcgtttctgggcgtaggttcgcgtgcggttttctgggtgttttttgtggactttaaccgttacgtcattttttagtcctatatatactcgctctgtacttggccctttttacactgtgactgattgagctggtgccgtgtcgagtggtgttttttaataggtttttttactggtaaggctgactgttatggctgccgctgtggaagcgctgtatgttgttctggagcgggagggtgctattttgcctaggcaggagggtttttcaggtgtttatgtgtttttctctcctattaattttgttatacctcctatgggggctgtaatgttgtctctacgcctgcgggtatgtattcccccgggctatttcggtcgctttttagcactgaccgatgttaaccaacctgatgtgtttaccgagtcttacattatgactccggacatgaccgaggaactgtcggtggtgctttttaatcacggtgaccagtttttttacggtcacgccggcatggccgtagtccgtcttatgcttataagggttgtttttcctgttgtaagacaggcttctaatgtttaaatgtttttttttttgttattttattttgtgtttaatgcaggaacccgcagacatgtttgagagaaaaatggtgtctttttctgtggtggttccggaacttacctgcctttatctgcatgagcatgactacgatgtgcttgcttttttgcgcgaggctttgcctgattttttgagcagcaccttgcattttatatcgccgcccatgcaacaagcttacataggggctacgctggttagcatagctccgagtatgcgtgtcataatcagtgtgggttcttttgtcatggttcctggcggggaagtggccgcgctggtccgtgcagacctgcacgattatgttcagctggccctgcgaagggacctacgggatcgcggtatttttgttaatgttccgcttttgaatcttatacaggtctgtgaggaacctgaatttttgcaatcatgattcgctgcttgaggctgaaggtggagggcgctctggagcagatttttacaatggccggacttaatattcgggatttgcttagagacatattgataaggtggcgagatgaaaattatttgggcatggttgaaggtgctggaatgtttatagaggagattcaccctgaagggtttagcctttacgtccacttggacgtgagggcagtttgccttttggaagccattgtgcaacatcttacaaatgccattatctgttctttggctgtagagtttgaccacgccaccggaggggagcgcgttcacttaatagatcttcattttgaggttttggataatcttttggaataaaaaaaaaaaaacatggttcttccagctcttcccgctcctcccgtgtgtgactcgcagaacgaatgtgtaggttggctgggtgtggcttattctgcggtggtggatgttatcagggcagcggcgcatgaaggagtttacatagaacccgaagccagggggcgcctggatgctttgagagagtggatatactacaactactacacagagcgagctaagcgacgagaccggagacgcagatctgtttgtcacgcccgcacctggttttgcttcaggaaatatgactacgtccggcgttccatttggcatgacactacgaccaacacgatctcggttgtctcggcgcactccgtacagtagggatcgcctacctccttttgagacagagacccgcgctaccatactggaggatcatccgctgctgcccgaatgtaacactttgacaatgcacaacgtgagttacgtgcgaggtcttccctgcagtgtgggatttacgctgattcaggaatgggttgttccctgggatatggttctgacgcgggaggagcttgtaatcctgaggaagtgtatgcacgtgtgcctgtgttgtgccaacattgatatcatgacgagcatgatgatccatggttacgagtcctgggctctccactgtcattgttccagtcccggttccctgcagtgcatagccggcgggcaggttttggccagctggtttaggatggtggtggatggcgccatgtttaatcagaggtttatatggtaccgggaggtggtgaattacaacatgccaaaagaggtaatgtttatgtccagcgtgtttatgaggggtcgccacttaatctacctgcgcttgtggtatgatggccacgtgggttctgtggtccccgccatgagctttggatacagcgccttgcactgtgggattttgaacaatattgtggtgctgtgctgcagttactgtgctgatttaagtgagatcagggtgcgctgctgtgcccggaggacaaggcgtctcatgctgcgggcggtgcgaatcatcgctgaggagaccactgccatgttgtattcctgcaggacggagcggcggcggcagcagtttattcgcgcgctgctgcagcaccaccgccctatcctgatgcacgattatgactctacccccatgtaggcgtggacttccccttcgccgcccgttgagcaaccgcaagttggacagcagcctgtggctcagcagctggacagcgacatgaacttaagcgagctgcccggggagtttattaatatcactgatgagcgtttggctcgacaggaaaccgtgtggaatataacacctaagaatatgtctgttacccatgatatgatgctttttaaggccagccggggagaaaggactgtgtactctgtgtgttgggagggaggtggcaggttgaatactagggttctgtgagtttgattaaggtacggtgatcaatataagctatgtggtggtggggctatactactgaatgaaaaatgacttgaaattttctgcaattgaaaaataaacacgttgaaacataacatgcaacaggttcacgattctttattcctgggcaatgtaggagaaggtgtaagagttggtagcaaaagtttcagtggtgtattttccactttcccaggaccatgtaaaagacatagagtaagtgcttacctcgctagtttctgtggattcactagaatcgatgtaggatgttgcccctcctgacgcggtaggagaaggggagggtgccctgcatgtctgccgctgctcttgctcttgccgctgctgaggaggggggcgcatctgccgcagcaccggatgcatctgggaaaagcaaaaaaggggctcgtccctgtttccggaggaatttgcaagcggggtcttgcatgacggggaggcaaacccccgttcgccgcagtccggccggcccgagactcgaaccgggggtcctgcgactcaacccttggaaaataaccctccggctacagggagcgagccacttaatgctttcgctttccagcctaaccgcttacgccgcgcgcggccagtggccaaaaaagctagcgcagcagccgccgcgcctggaaggaagccaaaaggagcgctcccccgttgtctgacgtcgcacacctgggttcgacacgcgggcggtaaccgcatggatcacggcggacggccggatccggggttcgaaccccggtcgtccgccatgatacccttgcgaatttatccaccagaccacggaagagtgcccgcttacaggctctccttttgcacggtctagagcgtcaacgactgcgcacgcctcaccggccagagcgtcccgaccatggagcactttttgccgctgcgcaacatctggaaccgcgtccgcgactttccgcgcgcctccaccaccgccgccggcatcacctggatgtccaggtacatctacggattacgtcgacgtttaaaccatatgatcagctcactcaaaggcggtaatacggttatccacagaatcaggggataacgcaggaaagaacatgtgagcaaaaggccagcaaaaggccaggaaccgtaaaaaggccgcgttgctggcgtttttccataggctccgcccccctgacgagcatcacaaaaatcgacgctcaagtcagaggtggcgaaacccgacaggactataaagataccaggcgtttccccctggaagctccctcgtgcgctctcctgttccgaccctgccgcttaccggatacctgtccgcctttctcccttcgggaagcgtggcgctttctcatagctcacgctgtaggtatctcagttcggtgtaggtcgttcgctccaagctgggctgtgtgcacgaaccccccgttcagcccgaccgctgcgccttatccggtaactatcgtcttgagtccaacccggtaagacacgacttatcgccactggcagcagccactggtaacaggattagcagagcgaggtatgtaggcggtgctacagagttcttgaagtggtggcctaactacggctacactagaagaacagtatttggtatctgcgctctgctgaagccagttaccttcggaaaaagagttggtagctcttgatccggcaaacaaaccaccgctggtagcggtggtttttttgtttgcaagcagcagattacgcgcagaaaaaaaggatctcaagaagatcctttgatcttttctacggggtctgacgctcagtggaacgaaaactcacgttaagggattttggtcatgagattatcaaaaaggatcttcacctagatccttttaaattaaaaatgaagttttaaatcaatctaaagtatatatgagtaaacttggtctgacagttagaaaaactcatcgagcatcaaatgaaactgcaatttattcatatcaggattatcaataccatatttttgaaaaagccgtttctgtaatgaaggagaaaactcaccgaggcagttccataggatggcaagatcctggtatcggtctgcgattccgactcgtccaacatcaatacaacctattaatttcccctcgtcaaaaataaggttatcaagtgagaaatcaccatgagtgacgactgaatccggtgagaatggcaaaagtttatgcatttctttccagacttgttcaacaggccagccattacgctcgtcatcaaaatcactcgcatcaaccaaaccgttattcattcgtgattgcgcctgagcgagacgaaatacgcgatcgctgttaaaaggacaattacaaacaggaatcgaatgcaaccggcgcaggaacactgccagcgcatcaacaatattttcacctgaatcaggatattcttctaatacctggaatgctgttttcccagggatcgcagtggtgagtaaccatgcatcatcaggagtacggataaaatgcttgatggtcggaagaggcataaattccgtcagccagtttagtctgaccatctcatctgtaacatcattggcaacgctacctttgccatgtttcagaaacaactctggcgcatcgggcttcccatacaatcgatagattgtcgcacctgattgcccgacattatcgcgagcccatttatacccatataaatcagcatccatgttggaatttaatcgcggcctagagcaagacgtttcccgttgaatatggctcatactcttcctttttcaatattattgaagcatttatcagggttattgtctcatgagcggatacatatttgaatgtatttagaaaaataaacaaataggggttccgcgcacatttccccgaaaagtgccacctaaattgtaagcgttaatattttgttaaaattcgcgttaaatttttgttaaatcagctcattttttaaccaataggccgaaatcggcaaaatcccttataaatcaaaagaatagaccgagatagggttgagtgttgttccagtttggaacaagagtccactattaaagaacgtggactccaacgtcaaagggcgaaaaaccgtctatcagggcgatggcccactacgtgaaccatcaccctaatcaagttttttggggtcgaggtgccgtaaagcactaaatcggaaccctaaagggagcccccgatttagagcttgacggggaaagccggcgaacgtggcgagaaaggaagggaagaaagcgaaaggagcgggcgctagggcgctggcaagtgtagcggtcacgctgcgcgtaaccaccacacccgccgcgcttaatgcgccgctacagggcgcgatggatcc

SEQ ID NO: 112 - DNA, 5929 bp, synthetic construct
  source 1..5929: mol_type = other DNA
ctgctattaataactatgctcaaaaattgtgtacctttagctttttaatttgtaaaggggttaataaggaatatttgatgtatagtgccttgactagagatcataatcagccataccacatttgtagaggttttacttgctttaaaaaacctcccacacctccccctgaacctgaaacataaaatgaatgcaattgttgttgttctagcttggccactccctctctgcgcgctcgctcgctcactgaggccgggcgaccaaaggtcgcccgacgcccgggctttgcccgggcggcctcagtgagcgagcgagcgcgcagagagggagtggccaactccatcactaggggttcctctcgaggagcttggcccattgcatacgttgtatccatatcataatatgtacatttatattggctcatgtccaacattaccgccatgttgacattgattattgactagttattaatagtaatcaattacggggtcattagttcatagcccatatatggagttccgcgttacataacttacggtaaatggcccgcctggctgaccgcccaacgacccccgcccattgacgtcaataatgacgtatgttcccatagtaacgccaatagggactttccattgacgtcaatgggtggagtatttacggtaaactgcccacttggcagtacatcaagtgtatcatatgccaagtacgccccctattgacgtcaatgacggtaaatggcccgcctggcattatgcccagtacatgaccttatgggactttcctacttggcagtacatctacgtattagtcatcgctattaccatggtgatgcggttttggcagtacatcaatgggcgtggatagcggtttgactcacggggatttccaagtctccaccccattgacgtcaatgggagtttgttttggcaccaaaatcaacgggactttccaaaatgtcgtaacaactccgccccattgacgcaaatgggcggtaggcgtgtacggtgggaggtctatataagcagagctcgtttagtgaaccgtcagatcgcctggagacgccatccacgctgttttgacctccatagaagacaccgggaccgatccagcctccccggctagagcttcccgggggtacccgccaccatggtgagcaagggcgaggagctgttcaccggggtggtgcccatcctggtcgagctggacggcgacgtaaacggccacaagttcagcgtgtccggcgagggcgagggcgatgccacctacggcaagctgaccctgaagttcatctgcaccaccggcaagctgcccgtgccctggcccaccctcgtgaccaccctgacctacggcgtgcagtgcttcagccgctaccccgaccacatgaagcagcacgacttcttcaagtccgccatgcccgaaggctacgtccaggagcgcaccatcttcttcaagggcgacggcaactacaagacccgcgccgaggtgaagttcgagggcgacaccctggtgaaccgcatcgagctgaagggcatcgacttcaaggaggacggcaacatcctggggcacaagctggagtacaactacaacagccacaacgtctatatcatggccgacaagcagaagaacggcatcaaggtgaacttcaagatccgccacaacatcgaggacggcagcgtgcagctcgccgaccactaccagcagaacacccccatcggcgacggccccgtgctgctgcccgacaaccactacctgagcacccagtccgccctgagcaaagaccccaacgagaagcgcgatcacatggtcctgctggagttcgtgaccgccgccgggatcactctcggcatggacgagctgtacaagtaaagtggccgcgactctagagggaattcgtcgacagatctgcctcgactgtgccttctagttgccagccatctgttgtttgcccctcccccgtgccttccttgaccctggaaggtgccactcccactgtcctttcctaataaaatgaggaaattgcatcgcattgtctgagtaggtgtcattctattctggggggtggggtggggcaggacagcaagggggaggattgggaagacaatagcaggcatgctggggatgcggtgggctctatggatcccctaactacaaggaacccctagtgatggagttggccactccctctctgcgcgctcgctcgctcactgaggccgggcgaccaaaggtcgcccgacgcccgggctttgcccgggcggcctcagtgagcgagcgagcgcgcagagagggacagatccccaggaagctcctctgtgtcctcataaaccctaacctcctctacttgagaggacattccaatcataggctgcccatccaccctctgtgtcctcctgttaattaggtcacttaacaaaaaggaaattgggtaggggtttttcacagaccgctttctaagggtaattttaaaatatctgggaagtcccttccactgctgtgttccagaagtgttggtaaacagcccacaaatgtcaacagcagaaacatacaagctgtcagctttgcacaagggcccaatctctggaagatccgcgcgtaccgagttctaattcactggccgtcgttttacaacgtcgtgactgggaaaaccctggcgttacccaacttaatcgccttgcagcacatccccctttcgccagctggcgtaatagcgaagaggcccgcaccgatcgcccttcccaacagttgcgcagcctgaatggcgaatggcgcctgatgcggtattttctccttacgcatctgtgcggtatttcacaccgcatatggtgcactctcagtacaatctgctctgatgccgcatagttaagccagccccgacacccgccaacacccgctgacgcgccctgacgggcttgtctgctcccggcatccgcttacagacaagctgtgaccgtctccgggagctgcatgtgtcagaggttttcaccgtcatcaccgaaacgcgcgagacgaaagggcctcgtgatacgcctatttttataggttaatgtcatgataataatggtttcttagacgtcaggtggcacttttcggggaaatgtgcgcggaacccccatttgtttatttttctaaatacattcaaatatgtatccgctcatgagacaataaccctgataaatgcttcaataatattgaaaaaggaagagtatgagtattcaacatttccgtgtcgcccttattcccttttttgcggcattttgccttcctgtttttgctcacccagaaacgctggtgaaagtaaaagatgctgaagatcagttgggtgcacgagtgggttacatcgaactggatctcaacagcggtaagatccttgagagttttcgccccgaagaacgttttccaatgatgagcacttttaaagttctgctatgtggcgcggtattatcccgtattgacgccgggcaagagcaactcggtcgccgcatacactattctcagaatgacttggttgagtactcaccagtcacagaaaagcatcttacggatggcatgacagtaagagaattatgcagtgctgccataaccatgagtgataacactgcggccaacttacttctgacaacgatcggaggaccgaaggagctaaccgcttttttgcacaacatgggggatcatgtaactcgccttgatcgttgggaaccggagctgaatgaagccataccaaacgacgagcgtgacaccacgatgcctgtagcaatggcaacaacgttgcgcaaactattaactggcgaactacttactctagcttcccggcaacaattaatagactggatggaggcggataaagttgcaggaccacttctgcgctcggcccttccggctggctggtttattgctgataaatctggagccggtgagcgtgggtctcgcggtatcattgcagcactggggccagatggtaagccctcccgtatcgtagttatctacacgacggggagtcaggcaactatggatgaacgaaatagacagatcgctgagataggtgcctcactgattaagcattggtaactgtcagaccaagtttactcatatatactttagattgatttaaaacttcatttttaatttaaaaggatctaggtgaagatcctttttgataatctcatgaccaaaatcccttaacgtgagttttcgttccactgagcgtcagaccccgtagaaaagatcaaaggatcttcttgagatcctttttttctgcgcgtaatctgctgcttgcaaacaaaaaaaccaccgctaccagcggtggtttgtttgccggatcaagagctaccaactctttttccgaaggtaactggcttcagcagagcgcagataccaaatactgttcttctagtgtagccgtagttaggccaccacttcaagaactctgtagcaccgcctacatacctcgctctgctaatcctgttaccagtggctgctgccagtggcgataagtcgtgtcttaccgggttggactcaagacgatagttaccggataaggcgcagcggtcgggctgaacggggggttcgtgcacacagcccagcttggagcgaacgacctacaccgaactgagatacctacagcgtgagctatgagaaagcgccacgcttcccgaagggagaaaggcggacaggtatccggtaagcggcagggtcggaacaggagagcgcacgagggagcttccagggggaaacgcctggtatctttatagtcctgtcgggtttcgccacctctgacttgagcgtcgatttttgtgatgctcgtcaggggggcggagcctatggaaaaacgccagcaacgcggcctttttacggttcctggccttttgctggccttttgctcacatgttctttcctgcgttatcccctgattctgtggataaccgtattaccgcctttgagtgagctgataccgctcgccgcagccgaacgaccgagcgcagcgagtcagtgagcgaggaagcggaagagcgcccaatacgcaaaccgcctctccccgcgcgttggccgattcattaatgcagctggcacgacaggtttcccgactggaaagcgggcagtgagcgcaacgcaattaatgtgagttagctcactcattaggcaccccaggctttacactttatgcttccggctcgtatgttgtgtggaattgtgagcggataacaatttcacacaggaaacagctatgaccatgattacgccaagtttgcacgcctgccgttcgacgatttcgcgagttggttcagctgctgcctgaggctggacgacctcgcggagttctaccggcagtgcaaatccgtcggcatccaggaaaccagcagcggctatccgcgcatccatgcccccgaactgcaggagtggggaggcacgatggccgctttggtccggatctttgtgaaggaaccttacttctgtggtgtgacataattggacaaactacctacagagatttaaagctctaaggtaaatataaaatttttaagtgtataatgtgttaaactactgattctaattgtttgtgtattttagattccaacctatggaactgatgaatgggagcagtggtggaatgcctttaatgaggaaaacctgttttgctcagaagaaatgccatctagtgatgatgaggctactgctgactctcaacattctactcctccaaaaaagaagagaaaggtagaagaccccaaggactttccttcagaattgctaagttttttgagtcatgctgtgtttagtaatagaactcttgcttgctttgctatttacaccacaaaggaaaaagctgcactgctatacaagaaaattatggaaaaatattctgtaacctttataagtaggcataacagttataatcataacatactgttttttcttactccacacaggcatagagtgt

SEQ ID NO: 113 - DNA, 9860 bp, synthetic construct
  source 1..9860: mol_type = other DNA
ctgctattaataactatgctcaaaaattgtgtacctttagctttttaatttgtaaaggggttaataaggaatatttgatgtatagtgccttgactagagatcataatcagccataccacatttgtagaggttttacttgctttaaaaaacctcccacacctccccctgaacctgaaacataaaatgaatgcaattgttgttgttctagcttggccactccctctctgcgcgctcgctcgctcactgaggccgggcgaccaaaggtcgcccgacgcccgggctttgcccgggcggcctcagtgagcgagcgagcgcgcagagagggagtggccaactccatcactaggggttcctctcgaggagcttggcccattgcatacgttgtatccatatcataatatgtacatttatattggctcatgtccaacattaccgccatgttactagtgtcgacattgattattgactagttattaatagtaatcaattacggggtcattagttcatagcccatatatggagttccgcgttacataacttacggtaaatggcccgcctggctgaccgcccaacgacccccgcccattgacgtcaataatgacgtatgttcccatagtaacgccaatagggactttccattgacgtcaatgggtggactatttacggtaaactgcccacttggcagtacatcaagtgtatcatatgccaagtacgccccctattgacgtcaatgacggtaaatggcccgcctggcattatgcccagtacatgaccttatgggactttcctacttggcagtacatctacgtattagtcatcgctattaccatgggtcgaggtgagccccacgttctgcttcactctccccatctcccccccctccccacccccaattttgtatttatttattttttaattattttgtgcagcgatgggggcggggggggggggggcgcgcgccaggcggggcggggcggggcgaggggcggggcggggcgaggcggagaggtgcggcggcagccaatcagagcggcgcgctccgaaagtttccttttatggcgaggcggcggcggcggcggccctataaaaagcgaagcgcgcggcgggcgggagtcgctgcgttgccttcgccccgtgccccgctccgcgccgcctcgcgccgcccgccccggctctgactgaccgcgttactcccacaggtgagcgggcgggacggcccttctcctccgggctgtaattagcgcttggtttaatgacggctcgtttcttttctgtggctgcgtgaaagccttaaagggctccgggagggccctttgtgcgggggggagcggctcggggggtgcgtgcgtgtgtgtgtgcgtggggagcgccgcgtgcggcccgcgctgcccggcggctgtgagcgctgcgggcgcggcgcggggctttgtgcgctccgcgtgtgcgcgaggggagcgcggccgggggcggtgccccgcggtgcgggggggctgcgaggggaacaaaggctgcgtgcggggtgtgtgcgtgggggggtgagcagggggtgtgggcgcggcggtcgggctgtaacccccccctgcacccccctccccgagttgctgagcacggcccggcttcgggtgcggggctccgtgcggggcgtggcgcggggctcgccgtgccgggcggggggtggcggcaggtgggggtgccgggcggggcggggccgcctcgggccggggagggctcgggggaggggcgcggcggccccggagcgccggcggctgtcgaggcgcggcgagccgcagccattgccttttatggtaatcgtgcgagagggcgcagggacttcctttgtcccaaatctggcggagccgaaatctgggaggcgccgccgcaccccctctagcgggcgcgggcgaagcggtgcggcgccggcaggaaggaaatgggcggggagggccttcgtgcgtcgccgcgccgccgtccccttctccatctccagcctcggggctgccgcagggggacggctgccttcgggggggacggggcagggcggggttcggcttctggcgtgtgaccggcggctctagagcctctgctaaccatgttcatgccttcttctttttcctacagctcctgggcaacgtgctggttgttgtgctgtctcatcattttggcaaagaattcggcgcgcccgggggtacccgccaccatggtgagcaagggcgaggagctgttcaccggggtggtgcccatcctggtcgagctggacggcgacgtaaacggccacaagttcagcgtgtccggcgagggcgagggcgatgccacctacggcaagctgaccctgaagttcatctgcaccaccggcaagctgcccgtgccctggcccaccctcgtgaccaccctgacctacggcgtgcagtgcttcagccgctaccccgaccacatgaagcagcacgacttcttcaagtccgccatgcccgaaggctacgtccaggagcgcaccatcttcttcaagggcgacggcaactacaagacccgcgccgaggtgaagttcgagggcgacaccctggtgaaccgcatcgagctgaagggcatcgacttcaaggaggacggcaacatcctggggcacaagctggagtacaactacaacagccacaacgtctatatcatggccgacaagcagaagaacggcatcaaggtgaacttcaagatccgccacaacatcgaggacggcagcgtgcagctcgccgaccactaccagcagaacacccccatcggcgacggccccgtgctgctgcccgacaaccactacctgagcacccagtccgccctgagcaaagaccccaacgagaagcgcgatcacatggtcctgctggagttcgtgaccgccgccgggatcactctcggcatggacgagctgtacaagtaaagtggccgcgactctagaggagatctgcctcgactgtgccttctagttgccagccatctgttgtttgcccctcccccgtgccttccttgaccctggaaggtgccactcccactgtcctttcctaataaaatgaggaaattgcatcgcattgtctgagtaggtgtcattctattctggggggtggggtggggcaggacagcaagggggaggattgggaagacaatagcaggcatgctggggatgcggtgggctctatggatcccctaactacaaggaacccctagtgatggagttggccactccctctctgcgcgctcgctcgctcactgaggccgggcgaccaaaggtcgcccgacgcccgggctttgcccgggcggcctcagtgagcgagcgagcgcgcagagagggagtggccaacaggaagctcctctgtgtcctcataaaccctaacctcctctacttgagaggacattccaatcataggctgcccatccaccctctgtgtcctcctgttaattaggtcacttaacaaaaaggaaattgggtaggggtttttcacagaccgctttctaagggtaattttaaaatatctgggaagtcccttccactgctgtgttccagaagtgttggtaaacagcccacaaatgtcaacagcagaaacatacaagctgtcagctttgcacaagggcccaatctctggaagatccgcgcgtaccgagttctaattcactggccgtcgttttacaacgtcgtgactgggaaaaccctggcgttacccaacttaatcgccttgcagcacatccccctttcgccagctggcgtaatagcgaagaggcccgcaccgatcgcccttcccaacagttgcgcagcctgaatggcgaatggcgcctgatgcggtattttctccttacgcatctgtgcggtatttcacaccgcatatggtgcactctcagtacaatctgctctgatgccgcatagttaagccagccccgacacccgccaacacccgctgacgcgccctgacgggcttgtctgctcccggcatccgcttacagacaagctgtgaccgtctccgggagctgcatgtgtcagaggttttcaccgtcatcaccgaaacgcgcgagacgaaagggcctcgtgatacgcctatttttataggttaatgtcatgataataatggtttcttagacgtcaggtggcacttttcggggaaatgtgcgcggaacccccatttgtttatttttctaaatacattcaaatatgtatccgctcatgagacaataaccctgataaatgcttcaataatattgaaaaaggaagagtatgagccatattcaacgggaaacgtcttgctctaggccgcgattaaattccaacatggatgctgatttatatgggtataaatgggctcgcgataatgtcgggcaatcaggtgcgacaatctatcgattgtatgggaagcccgatgcgccagagttgtttctgaaacatggcaaaggtagcgttgccaatgatgttacagatgagatggtcagactaaactggctgacggaatttatgcctcttccgaccatcaagcattttatccgtactcctgatgatgcatggttactcaccactgcgatccctgggaaaacagcattccaggtattagaagaatatcctgattcaggtgaaaatattgttgatgcgctggcagtgttcctgcgccggttgcattcgattcctgtttgtaattgtccttttaacagcgatcgcgtatttcgtctcgctcaggcgcaatcacgaatgaataacggtttggttgatgcgagtgattttgatgacgagcgtaatggctggcctgttgaacaagtctggaaagaaatgcataaacttttgccattctcaccggattcagtcgtcactcatggtgatttctcacttgataaccttatttttgacgaggggaaattaataggttgtattgatgttggacgagtcggaatcgcagaccgataccaggatcttgccatcctatggaactgcctcggtgagttttctccttcattacagaaacggctttttcaaaaatatggtattgataatcctgatatgaataaattgcagtttcatttgatgctcgatgagtttttctaaaagcttgtgcaatgccacaaagaagagtcaatcgcagacaacattttgaatgcggtcacacgttagcagcatgattgccacggatggcaacatattaacggcatgatattgacttattgaataaaattgggtaaatttgactcaacgatgggttaattcgctcgttgtggtagtgagatgaaaagaggcggcgcttactaccgattccgcctagttggtcacttcgacgtatcgtctggaactccaaccatcgcaggcagagaggtctgcaaaatgcaatcccgaaacagttcgcaggtaatagttagagcctgcataacggtttcgggattttttatatctgcacaacaggtaagagcattgagtcgataatcgtgaagagtcggcgagcctggttagccagtgctctttccgttgtgctgaattaagcgaataccggaagcagaaccggatcaccaaatgcgtacaggcgtcatcgccgcccagcaacagcacaacccaaactgagccgtagccactgtctgtcctgaattcattagtaatagttacgctgcggccttttacacatgaccttcgtgaaagcgggtggcaggaggtcgcgctaacaacctcctgccgttttgcccgtgcatatcggtcacgaacaaatctgattactaaacacagtagcctggatttgttctatcagtaatcgaccttattcctaattaaatagagcaaatccccttattgggggtaagacatgaagatgccagaaaaacatgacctgttggccgccattctcgcggcaaaggaacaaggcatcggggcaatccttgcgtttgcaatggcgtaccttcgcggcagatataatggcggtgcgtttacaaaaacagtaatcgacgcaacgatgtgcgccattatcgcctggttcattcgtgaccttctcgacttcgccggactaagtagcaatctcgcttatataacgagcgtgtttatcggctacatcggtactgactcgattggttcgcttatcaaacgcttcgctgctaaaaaagccggagtagaagatggtagaaatcaataatcaacgtaaggcgttcctcgatatgctggcgtggtcggagggaactgataacggacgtcagaaaaccagaaatcatggttatgacgtcattgtaggcggagagctatttactgattactccgatcaccctcgcaaacttgtcacgctaaacccaaaactcaaatcaacaggcgccggacgctaccagcttctttcccgttggtgggatgcctaccgcaagcagcttggcctgaaagacttctctccgaaaagtcaggacgctgtggcattgcagcagattaaggagcgtggcgctttacctatgattgatcgtggtgatatccgtcaggcaatcgaccgttgcagcaatatctgggcttcactgccgggcgctggttatggtcagttcgagcataaggctgacagcctgattgcaaaattcaaagaagcgggcggaacggtcagagagattgatgtatgagcagagtcaccgcgattatctccgctctggttatctgcatcatcgtctgcctgtcatgggctgttaatcattaccgtgataacgccattacctacaaagcccagcgcgacaaaaatgccagagaactgaagctggcgaacgcggcaattactgacatgcagatgcgtcagcgtgatgttgctgcgctcgatgcaaaatacacgaaggagttagctgatgctaaagctgaaaatgatgctctgcgtgatgatgttgccgctggtcgtcgtcggttgcacatcaaagcagtctgtcagtcagtgcgtgaagccaccaccgcctccggcgtggataatgcagcctccccccgactggcagacaccgctgaacgggattatttcaccctcagagagaggctgatcactatgcaaaaacaactggaaggaacccagaagtatattaatgagcagtgcagatagagttgcccatatcgatgggcaactcatgcaattattgtgagcaatacacacgcgcttccagcggagtataaatgcctaaagtaataaaaccgagcaatccatttacgaatgtttgctgggtttctgttttaacaacattttctgcgccgccacaaattttggctgcatcgacagttttcttctgcccaattccagaaacgaagaaatgatgggtgatggtttcctttggtgctactgctgccggtttgttttgaacagtaaacgtctgttgagcacatcctgtaataagcagggccagcgcagtagcgagtagcatttttttcatggtgttattcccgatgctttttgaagttcgcagaatcgtatgtgtagaaaattaaacaaaccctaaacaatgagttgaaatttcatattgttaatatttattaatgtatgtcaggtgcgatgaatcgtcattgtattcccggattaactatgtccacagccctgacggggaacttctctgcgggagtgtccgggaataattaaaacgatgcacacagggtttagcgcgtacacgtattgcattatgccaacgccccggtgctgacacggaagaaaccggacgttatgatttagcgtggaaagatttgtgtagtgttctgaatgctctcagtaaatagtaatgaattatcaaaggtatagtaatatcttttatgttcatggatatttgtaacccatcggaaaactcctgctttagcaagattttccctgtattgctgaaatgtgatttctcttgatttcaacctatcataggacgtttctataagatgcgtgtttcttgagaatttaacatttacaacctttttaagtccttttattaacacggtgttatcgttttctaacacgatgtgaatattatctgtggctagatagtaaatataatgtgagacgttgtgacgtttgctagcctgtcagaccaagtttactcatatatactttagattgatttaaaacttcatttttaatttaaaaggatctaggtgaagatcctttttgataatctcatgaccaaaatcccttaacgtgagttttcgttccactgagcgtcagaccccgtagaaaagatcaaaggatcttcttgagatcctttttttctgcgcgtaatctgctgcttgcaaacaaaaaaaccaccgctaccagcggtggtttgtttgccggatcaagagctaccaactctttttccgaaggtaactggcttcagcagagcgcagataccaaatactgttcttctagtgtagccgtagttaggccaccacttcaagaactctgtagcaccgcctacatacctcgctctgctaatcctgttaccagtggctgctgccagtggcgataagtcgtgtcttaccgggttggactcaagacgatagttaccggataaggcgcagcggtcgggctgaacggggggttcgtgcacacagcccagcttggagcgaacgacctacaccgaactgagatacctacagcgtgagctatgagaaagcgccacgcttcccgaagggagaaaggcggacaggtatccggtaagcggcagggtcggaacaggagagcgcacgagggagcttccagggggaaacgcctggtatctttatagtcctgtcgggtttcgccacctctgacttgagcgtcgatttttgtgatgctcgtcaggggggcggagcctatggaaaaacgccagcaacgcggcctttttacggttcctggccttttgctggccttttgctcacatgttctttcctgcgttatcccctgattctgtggataaccgtattaccgcctttgagtgagctgataccgctcgccgcagccgaacgaccgagcgcagcgagtcagtgagcgaggaagcggaagagcgcccaatacgcaaaccgcctctccccgcgcgttggccgattcattaatgcagctggcacgacaggtttcccgactggaaagcgggcagtgagcgcaacgcaattaatgtgagttagctcactcattaggcaccccaggctttacactttatgcttccggctcgtatgttgtgtggaattgtgagcggataacaatttcacacaggaaacagctatgaccatgattacgccaagtttgcacgcctgccgttcgacgatttcgcgagttggttcagctgctgcctgaggctggacgacctcgcggagttctaccggcagtgcaaatccgtcggcatccaggaaaccagcagcggctatccgcgcatccatgcccccgaactgcaggagtggggaggcacgatggccgctttggtccggatctttgtgaaggaaccttacttctgtggtgtgacataattggacaaactacctacagagatttaaagctctaaggtaaatataaaatttttaagtgtataatgtgttaaactactgattctaattgtttgtgtattttagattccaacctatggaactgatgaatgggagcagtggtggaatgcctttaatgaggaaaacctgttttgctcagaagaaatgccatctagtgatgatgaggctactgctgactctcaacattctactcctccaaaaaagaagagaaaggtagaagaccccaaggactttccttcagaattgctaagttttttgagtcatgctgtgtttagtaatagaactcttgcttgctttgctatttacaccacaaaggaaaaagctgcactgctatacaagaaaattatggaaaaatattctgtaacctttataagtaggcataacagttataatcataacatactgttttttcttactccacacaggcatagagtgt

SEQ ID NO: 114 - DNA, 20 bp, synthetic construct
  source 1..20: mol_type = other DNA
caagcccatgtacacaccag

SEQ ID NO: 115 - DNA, 20 bp, synthetic construct
  source 1..20: mol_type = other DNA
gggcaaagcttctgtctgag

SEQ ID NO: 116 - DNA, 28 bp, synthetic construct
  source 1..28: mol_type = other DNA
ctgacatctgccacgagctgctgggcca

SEQ ID NO: 117 - DNA, 3168 bp, synthetic construct
  source 1..3168: mol_type = other DNA
gctagcgccaccatggagaagagactgggcgtgaagcccaaccccgcctcctggatcctgagcggctactactggcagacaagcgccaagtggctgagaagcctgtacctgttctacacctgcttctgcttcagcgtgctgtggctgagcaccgacgcctccgagagcagatgtcagcaaggcaagacacagttcggcgtgggcctgagaagcggcggcgagaaccacctgtggctgctcgagggcaccccctccctgcagagctgtctcgctgcctgctgccaagacagcgcctgccacgtgttctggtggctggagggcatgtgcatccaagccgactgcagcagacctcagagctgcagagccttcagaacccacagcagcaacagcatgctggtgttcctgaagaagtttcagaccgccgacgacctggggttcctgcccgaggacgacgtgcctcacctgctgggcctggggtggaattgggcttcctggagacagagcccccctagagccgccctgagacccgccgtgagcagcagcgatcagcagtccctgatcagaaagctgcagaagagaggcagccctagcgacgtggtgacccccatcgtgacacagcacagcaaggtgaacgacagcaacgagctgggcggcctgaccacaagcggcagcgccgaggtgcacaaggccatcaccatcagcagccccctgaccaccgacctgaccgctgagctgagcggcggccccaagaacgtgagcgtgcaacccgaaattagcgaggggctcgccaccacccctagcacacagcaagtgaagagcagcgagaagacacagatcgccgtgccccaacccgtggcccctagctacagctacgccacccccaccccccaagcctcctttcagagcacaagcgccccctaccccgtgatcaaggagctggtggtgagcgccggcgagagcgtgcagatcaccctgcccaagaacgaggtgcagctgaatgcctacgtgctgcaagagccccctaagggggagacctacacctacgactggcagctgatcacccaccctagagactacagcggcgagatggagggcaagcacagccaaatcctgaaactcagcaagctgacccccggcctgtacgagttcaaggtgatcgtggaggggcagaacgcccacggcgagggctacgtgaacgtgaccgtgaagcccgagcctagaaagaaccggcctcccatcgccatcgtgagccctcagttccaagagatcagcctgcctaccacaagcaccgtgatcgacggcagccaaagcacagacgacgataaaatcgtgcagtaccactgggaggagctgaagggccccctgagagaggagaagatcagcgaggacaccgccatcctgaagctgagcaagctcgtgcccggcaactacaccttcagcctgaccgtggtggacagcgacggcgccaccaacagcaccaccgccaacctgaccgtgaacaaggccgtggactacccccccgtggccaacgccggccccaaccaagtgattaccctgccccaaaacagcatcaccctgttcggcaaccaaagcaccgacgaccacggcatcacaagctacgagtggagcctgagccctagcagcaagggcaaggtggtggagatgcaaggcgtgagaacccccaccctgcagctgagcgccatgcaagagggcgactacacctatcagctgaccgtgaccgacaccatcgggcagcaagccaccgcccaagtgaccgtgatcgtgcagcccgaaaacaacaagccccctcaagccgacgccggccccgacaaggagctgaccctgcccgtggacagcaccaccctggacggctccaagagcagcgatgatcagaagatcatcagctacctctgggagaagacccaaggccccgacggcgtgcagctggagaacgccaacagcagcgtggccaccgtgaccggcctgcaagtgggcacctacgtgttcaccctcaccgtcaaggacgagagaaacctgcagagccaaagcagcgtgaacgtgatcgtgaaggaggagatcaacaaaccccctatcgccaagatcaccggcaacgtggtgattacactgcctacaagcaccgccgagctggacggcagcaagagcagcgacgacaagggcatcgtgagctacctctggacaagagacgagggctcccctgccgccggcgaggtgctgaaccacagcgatcaccaccccatcctgttcctgagcaacctcgtggaaggcacctacaccttccacctgaaggtgaccgacgccaagggcgagagcgacaccgacagaaccaccgtggaggtgaagcccgacccccggaagaacaacctggtggagattatcctggacatcaacgtgagccaactgaccgagagactgaagggcatgttcatcagacagatcggcgtgctgctgggcgtgctcgacagcgacatcatcgtgcagaagattcagccctacaccgagcagagcaccaagatggtgttcttcgtgcagaacgagcccccccatcagatcttcaagggccacgaggtggccgccatgctgaagagcgagctgagaaagcagaaggccgacttcctgatcttcagagccctggaggtgaacaccgtgacctgtcagctgaactgcagcgaccacggccactgcgacagcttcaccaagagatgcatctgcgaccccttctggatggagaacttcatcaaggtgcaactcagagatggcgacagcaactgcgagtggagcgtgctgtacgtgatcatcgccaccttcgtgatcgtggtggccctgggcatcctgagctggaccgtgatctgctgttgcaagagacagaagggcaagcccaagagaaagagcaagtacaagatcctggacgccaccgaccaagagagcctggagctgaagcccacaagccgggccggcatcaagcagaagggcctgctcctgagcagcagcctgatgcatagcgagagcgagctggactccgacgacgccatcttcacctggcccgacagagagaaagggaagctgctgcacgggcagaacggcagcgtgcccaacgggcagacccccctgaaggctagaagccctagagaggagatcctgtaatctaga
